(19) United States
(12) Patent Application Publication
(10) Pub. No.: US 2019/0256933 A1
(43) Pub. Date: Aug. 22, 2019

(54) Guayule Molecular Markers And Primers And Use Of Molecular Markers, Primers And Rate Of Apomixis For Guayule Identification, Characterization And Breeding

(71) Applicants: Vonmark V. CRUZ, Eloy, AZ (US); David A. DIERIG, Eloy, AZ (US); Bridgestone Corporation, Chuo-ku (JP)

(72) Inventors: Vonmark V. Cruz, Casa Grande, AZ (US); David A. Dierig, Phoenix, AZ (US)

(73) Assignee: Bridgestone Corporation, Chuo-ku (JP)

(21) Appl. No.: 15/768,661

(22) PCT Filed: Oct. 14, 2016
(86) PCT No.: PCT/US2016/057227

§ 371 Date: Apr. 16, 2018

Related U.S. Application Data
(60) Provisional application No. 62/242,951, filed on Oct. 16, 2015.
(60) Provisional application No. 62/242,960, filed on Oct. 16, 2015.
(60) Provisional application No. 62/399,993, filed on Sep. 26, 2016.

(51) Int. Cl. C12Q 1/6895; A01H 6/14; C08L 7/00

(52) U.S. Cl. CPC C12Q 1/6895; A01H 6/14; C12Q 2600/158; C12Q 2600/13; C12Q 2600/156; C08L 7/00

(57) ABSTRACT

The present invention is directed to guayule molecular markers and primers and use of those markers and primers for guayule identity, characterization and breeding. The invention is further directed to a method for breeding guayule that involves determining the rate of apomixis of one or more guayule plants, determining the genetic pedigree of one or more guayule plants, and using that information to identify one or more select guayule plants for use in guayule plant breeding to produce an advanced guayule plant.

### CROSS-REFERENCE TO RELATED APPLICATIONS

[0001] This application claims the benefit of U.S. Provisional Application Ser. Nos. 62/242,951 and 62/242,960, filed Oct. 16, 2015, and U.S. Provisional Patent Application Ser. No. 62/399,993, filed Sep. 26, 2016, all of which are incorporated herein by reference in their entirety.

### STATEMENT OF FEDERALLY FUNDED RESEARCH

[0002] Not applicable.

### TECHNICAL FIELD OF THE INVENTION

[0003] The present invention relates in general to the fields of guayule plants, molecular markers and primers, the rate of apomixis and plant identification, characterization and breeding techniques using such molecular markers, primers and rates of apomixis.

### BACKGROUND ART

[0004] Natural rubber is a valuable and strategically important biomaterial. The predominant source of natural rubber cultivated for commercial production is Hevea brasiliensis, which is grown mostly in South America, Southeast Asia and areas of Africa and India. To meet the demands for natural rubber and provide a sustainable source of biorubber in alternative geographic locations, other species of rubber producing plants have been studied.

[0005] Guayule (Parthenium argentatum) is a perennial desert shrub species native to northcentral Mexico and southwestern Texas. Guayule is being studied as an alternative source of natural rubber for potential large scale commercial production. Guayule produces rubber within its cells that generally must be destructively harvested after the plant reaches maturity. The guayule produced rubber also provides a benefit of being free from the proteins responsible for latex allergies that can be caused by Hevea sourced natural rubber.

[0006] There is a need for diversifying the production of natural rubber and improvements in the breeding and characteristics of guayule plants that produce natural rubber.

### SUMMARY OF THE INVENTION

[0007] The present invention is directed to molecular markers for guayule and methods of using those molecular markers to identify, characterize and breed guayule. In a preferred embodiment, the molecular markers are single nucleotide polymorphisms (SNPs) or short tandem repeating mono-, di-, tri-, tetra- penta, and hexanucleotide microsatellites (simple sequence repeats or SSRs). Further preferably, the molecular markers are polymorphic. In another preferred embodiment the molecular markers are associated with expressed traits of the guayule plant, particularly those associated with improved plant yield, size, uniformity and rubber production. The invention is further directed to methods for determining the rate of apomixis in guayule plants and using information regarding the rate of apomixis in a method for breeding a guayule plant, for example, in the identification of guayule plants for breeding, either alone or in combination with a step of determining the genetic pedigree of a plant. e.g., by DNA analysis using SNPs and/or SSRs.

[0008] In another embodiment, the present invention is directed to primers associated with SNPs or SSRs according to the invention. In a preferred embodiment, the primers are used in a method to amplify a molecular marker such as an SNP or SSR, and in a further preferred embodiment that molecular marker is polymorphic. In a further preferred embodiment, the invention is directed to a primer kit containing a set of primers to be used in the methods according to the invention.

[0009] In one embodiment, the molecular markers and primers according to the invention are used in a method to evaluate the genetic diversity of guayule germplasm from one or more collections of guayule germplasm.

[0010] In another embodiment, the molecular markers and primers according to the invention are used in a method to quantify genetic similarity or distance among accessions within one or more collections of guayule germplasm.

[0011] In another embodiment, the molecular markers and primers according to the invention are used in a method of parenteral germplasm screening and/or selection.

[0012] In another embodiment, the molecular markers and primers according to the invention are used in a method for the genetic advancement of guayule germplasm.

[0013] In another embodiment, the molecular markers and primers according to the invention are used in a method to screen and select one or more guayule cells, tissues, seedlings, plants, plant parts, hybrids or progeny thereof.

[0014] In another embodiment, the molecular markers and primers according to the invention are used in a method to develop new varieties of guayule.

[0015] In another embodiment, the molecular markers and primers according to the invention are used in a method of selection for one or more traits of guayule cells, tissues, seedlings, plants, plant parts, hybrids or progeny thereof.

[0016] In another embodiment, the molecular markers and primers according to the invention are used in a method of identification, validation and/or quality assessment, including germplasm identity, parental background recovery, and seed purity testing.

[0017] In a further preferred embodiment, the molecular markers, primers and methods according to the invention are used to identify or improve an expressed trait of a guayule plant including rubber content, rubber quality, rubber yield, average molecular weight of rubber, plant size, plant yield, plant vigor, plant uniformity, salinity tolerance, temperature tolerance, disease resistance, or drought tolerance.

[0018] In a further preferred embodiment, the invention is directed to guayule plant cells, plant tissue, seedlings, plant parts, plants, and progeny thereof produced by any of the methods according to the invention. Another embodiment of the invention is the rubber composition produced by or extracted from such guayule plants produced by any of the methods according to the invention. In one embodiment, those guayule plant cells, plant tissue, seedlings, plant parts, plants, and progeny thereof have an improved expressed trait, phenotype and/or genotype over naturally occurring guayule or publicly available guayule germplasm.

[0019] The invention is also directed to products comprising the rubber produced by or extracted from guayule plants according to the invention or in plants produced by any of the methods according to the invention. Those products may include tires and latex products for the medical profession.

### DESCRIPTION OF THE DRAWINGS

[0020] For a more complete understanding of the features and advantages of the present invention, reference is now made to the detailed description of the invention along with the accompanying figures.

[0021] FIG. 1 is a principal coordinate analysis of guayule accessions showing the 2D relationships among the represented guayule germplasm per ploidy level.

[0022] FIG. 2 is a principal coordinate analysis using pairwise genetic distances among individual plant samples from 54 SSR markers.

[0023] FIG. 3 is a diagram of Bayesian cluster assignments of guayule germplasm from controlled crosses.

[0024] FIG. 4 is a tree representing the genetic relationships among a subset of private and public guayule germplasm (red=private; black=public germplasm) using SSR markers.

[0025] FIG. 5 is a general outline of NGS assisted plant breeding from Ray, S. and Sataya, P., 2014 “Next Generation Sequencing Technologies for Next Generation Plant Breeding,” Front. Plant Sci.

[0026] FIG. 6 is a diagram providing an overview of paired-end RAD sequencing. In section A, genomic DNA is digested with a restriction endonuclease. In section B, after ligation with a primary adapter, the fragments are sheared, then ligated with a secondary adapter. In section C, a composite mixture of variable length fragments is recovered from each restriction enzyme digestion site. These fragments are size selected, amplified and sequenced on a next-generation DNA sequencing platform using paired end chemistry. In section D, development of the genomic assembly around each digestion site is then completed bioinformatically.

[0027] FIG. 7 is a DNA quality check of four guayule DNA samples.

[0028] FIG. 8 is a diagram of a summary neighbor joining tree from Nei's distances showing the relationships among the different diploid HS and USDA germplasm, BART historical germplasm, and other representative polyploids such as G7-11 (Rec ID 88716 and 88717).

[0029] FIG. 9 is a diagram of a tree showing genetic similarity among individual plants of each germplasm type (HS or accession). Colors denote original group assignment. Some clusters contain plants from one or more HS (e.g. HS 5 and HS 14) indicating genetic admixture. Polyploid germplasm are shown to separately group from diploids.

[0030] FIG. 10 is a diagram of expected heterozygosity of SNP loci within each diploid germplasm.

[0031] FIG. 11 is a matrix of average number of pairwise differences among the diploid germplasm. The above diagonal indicates differences between germplasm, the diagonal elements show differences within germplasm, and the below diagonal the Nei pairwise genetic distances.

[0032] FIG. 12 is a diagram of the possible reproductive classes from a tetraploid X tetraploid.

[0033] FIG. 13 is a graph of seed maturity vs. nuclei staining (red=seed; black=2x reference).

[0034] FIG. 14 is a graph of embryo ploidy detectable at all development stages (red=early; blue=mid; late=black).

[0035] FIG. 15 is a graph of DNA content—seed+internal control.

[0036] FIG. 16 is a graph of apomictic seed from a 4x plant.

### DETAILED DESCRIPTION OF THE INVENTION

[0037] The present invention is directed to the genetic improvement of guayule. In a preferred embodiment, the compositions and methods according to the present invention can be used to improve a guayule crop for higher plant yield, size, uniformity and rubber production, and other traits that will make it suitable for large scale agriculture.

[0038] The present invention is directed to molecular markers for guayule and methods of using those molecular markers to identify, characterize and breed guayule. In a preferred embodiment, the molecular markers are single nucleotide polymorphisms (SNPs) or short tandem repeating mono-, di-, tri-, tetra- penta, and hexanucleotide microsatellites (simple sequence repeats or SSRs). Further preferably, the molecular markers are polymorphic. In a further preferred embodiment, the SNPs are selected from the SNPs listed in Table 9. In another preferred embodiment, the SSRs are selected from the SSRs listed in Tables 11 and 12.

[0039] In another embodiment, the present invention is directed to the primers associated with SNPs or SSRs according to the invention. In a preferred embodiment, the primers are used in a method to amplify a molecular marker such as an SNP or SSR, and in a further preferred embodiment that molecular marker is polymorphic. In another embodiment, the invention is directed to an isolated nucleic acid molecule, or primer, for detecting a molecular marker representing a polymorphism in guayule plant DNA, wherein said nucleic acid molecule comprises at least 15 nucleotides that include or are immediately adjacent to said polymorphism, wherein said nucleic acid molecule is at least 90 percent identical to a sequence of the same number of consecutive nucleotides in either strand of DNA that include or are immediately adjacent to said polymorphism. The polymorphism is preferably a polymorphic SNP or SSR, for example, a SNP or SSR identified in Tables 9, 11 and 12. In a further preferred embodiment, the invention is directed to a primer kit containing a set of primers to be used in the methods according to the invention. In a preferred embodiment, the set of primers comprises one or more primers listed in Tables 11 and 12.

[0040] In one embodiment, the molecular markers and primers according to the invention are used in a method to evaluate the genetic diversity of guayule germplasm from one or more collections of guayule germplasm. For example, the invention may be directed to a method for determining the contributions of guayule populations to a guayule genome, comprising performing a genotyping assay on a sample obtained from a test guayule plant to determine the identity of one or both alleles present in the test guayule plant genome for each set of markers, wherein the set of markers is indicative of the contribution of guayule populations of the genome of the test guayule plant. In a preferred embodiment, the set of markers used in that method comprises at least five markers or, more preferably, at least ten markers. In one embodiment, the set of markers are selected from single nucleotide polymorphisms (SNPs) or single nucleotide repeat microsatellites, di-, tri-, tetra-, penta- and hexanucleotide simple sequence repeats (SSRs). In a further preferred embodiment, the set of molecular markers comprises markers listed in Tables 9, 11 and 12.

[0041] In another embodiment, the molecular markers and primers according to the invention are used in a method to quantify genetic similarity or distance among accessions within one or more collections of guayule germplasm.

[0042] In another embodiment, the molecular markers and primers according to the invention are used in a method of parenteral germplasm screening and/or selection. For example, a preferred embodiment is directed to a method for determining the genotype of guayule germplasm, comprising the steps of (a) amplifying the guayule germplasm using a set of primers comprising primers identified in Tables 11 and 12; and (b) determining the genotype using a combination of molecular markers comprising molecular markers identified in Tables 11 and 12. Another embodiment of the invention is a primer kit comprising primers identified in Tables 11 and 12.

[0043] In another embodiment, the molecular markers and primers according to the invention are used in a method for the genetic advancement of guayule germplasm.

[0044] In another embodiment, the molecular markers and primers according to the invention are used in a method to screen and select one or more guayule cells, tissues, seedlings, plants, plant parts, hybrids or progeny thereof.

[0045] In another embodiment, the molecular markers and primers according to the invention are used in a method to develop a new variety of guayule. For example, the invention may be directed to a guayule plant breeding method comprising (a) evaluating guayule plants using objective criteria to obtain phenotype scores; (b) determining the genetic pedigree of the guayule plants using DNA analysis; and (c) using the phenotype scores and genetic pedigrees to identify one or more select guayule plants for use in a next generation of guayule plant breeding to produce an advanced generation of guayule plants. Preferably, the DNA analysis is performed using DNA of single nucleotide polymorphism (SNP) or single nucleotide repeat microsatellites, di-, tri-, tetra-, penta-, or hexanucleotide simple sequence repeats (SSRs). In a further preferred embodiment, two select guayule plants are identified that are genetically dissimilar or highly dissimilar and the two select plants are crossed to produce an advanced generation of guayule plants.

[0046] In another embodiment, the molecular markers and primers according to the invention are used in a method of selection for one or more traits of guayule cells, tissues, seedlings, plants, plant parts, hybrids or progeny thereof. For example, one embodiment of the invention is directed to a method for identifying a genetic marker linked to a trait locus of a guayule plant, said method comprising the steps of: (a) extracting nucleic acid from a guayule plant; (b) amplifying the nucleic acid using a set of primers comprising primers identified in Tables 11 and 12; (c) determining the genotype using a set of molecular markers comprising molecular markers identified in Tables 11 and 12; and (d) associating a genetic marker with an expressed trait of the guayule plant. In a further preferred embodiment, the genetic marker is linked to a trait such as rubber content, rubber quality, rubber yield, average molecular weight of rubber, plant size, plant vigor, plant uniformity, salinity tolerance, temperature tolerance, disease resistance, or drought tolerance. In a preferred embodiment, the temperature tolerance is cold tolerance.

[0047] In another embodiment, the molecular markers and primers according to the invention are used in a method of identification, validation and/or quality assessment, including germplasm identity, parental background recovery, and seed purity testing.

[0048] In a further preferred embodiment, the molecular markers, primers and methods according to the invention are used to improve the characteristics of a guayule plant including rubber content, rubber quality, rubber yield, average molecular weight of rubber, plant size, plant vigor, plant uniformity, salinity tolerance, temperature tolerance, disease resistance, or drought tolerance.

[0049] In a further preferred embodiment, the invention is directed to guayule plant cells, plant tissue, seedlings, plant parts, plants, and progeny thereof produced by any of the methods according to the invention. Another embodiment of the invention is the rubber composition produced by or extracted from such guayule plants produced by any of the methods according to the invention. In one embodiment, those guayule plant cells, plant tissue, seedlings, plant parts, plants, and progeny thereof have an improved expressed trait, phenotype and/or genotype over naturally occurring guayule or publicly available guayule germplasm.

[0050] The invention is also directed to products comprising the rubber produced by or extracted from plants according to the invention, including tires and latex products for the medical profession.

### Experimental Procedures

[0051] A study was conducted to develop microsatellite (SSR) and single nucleotide repeat (SNP) markers that can be used in methods according to the invention, including methods in which molecular markers are used to screen for genetic diversity, perform marker assisted selection, and aid trait introgression for guayule breeding.

[0052] Publicly available guayule expressed sequenced tags were used to develop 713 SSR primer pairs and testing was completed on 193 SSRs. A set of SSRs was used to screen the genetic diversity of USDA guayule collection and a private germplasm collection to assess the genetic variation within accessions and among various guayule genetic groups.

[0053] In addition to SSRs, SNP markers were developed for guayule breeding. A total of 1,065 SNPs were identified from four guayule sequence libraries and the level of polymorphism was studied. SNPs are identified in Table 9. SSRs and their corresponding primers are identified in Tables 11 and 12. The two marker systems provide unique opportunities for use in guayule molecular breeding for plant improvement.

[0054] Molecular markers for guayule were developed to increase the available information for decision making during guayule improvement activities. Research to find markers that are useful for estimating genetic diversity also aimed to identify molecular markers that are tightly linked to traits. Having these useful markers will enable rapid screening of segregating phenotypes at an early stage of development, with potential time and cost savings.

[0055] A. Development and Testing of Microsatellite Markers (SSR)

[0056] Initial work to develop primers for microsatellite (simple sequence repeat or SSR) markers was completed. Expressed sequenced tags (EST) made publicly available by the USDA-ARS Elastomics Project through the NCBI EST online database were downloaded. A total of 11.739 EST sequences were obtained and contigs assembled by using an overlap identity cutoff of 80% and using masking processes to identify repeats, vector, and organelle sequences. From the contigs, 337 microsatellite units were identified while 515 microsatellite units on the singletons (sequences did not contain enough overlap in length to be combined with others). The microsatellites from the contigs have the following proportion of repeat units: 73 (21.7%) di-, 242 (71.8%) tri-, 12 (3.5%) tetra-, and 10 (3.0%) hexa-nucleotides. Primers for microsatellite units in contigs and singletons were designed based on the following parameters: 100-500 amplicon size, 18-24 bp primer size, 40-60% G-C content, 55-60° C., with 58° C. optimal Tₘ. A total of 198 SSR primers were designed from the contigs and 515 from the singletons (see Tables 11 and 12 for primer sequences and SSRs).

[0057] Preliminary primer testing was conducted using seven guayule germplasm (11591, 11604, 141660, 141678, AZ-2, S1, S3) representing various ploidy levels (2× to 6×). Leaf tissue was obtained on 10 to 12 individual plants per accession and the DNA was processed for extraction and genotyping. Two bulks of DNA samples per accession were made by pooling DNA from six different plants (five for the triploid accessions).

[0058] An 18 bps M13 fragment was added to forward primer of all 198 markers and FAM fluorescent dye was used to label the primers. Polymerase chain reaction (PCR) was performed using Applied Biosystems® GeneAmp® PCR System 9700 following 50 cycles with 95° C. denaturation, 55° C. annealing and 72° C. extension. The amplified products were run on ABI 3730x1 sequencer in order to separate DNA fragments based on their molecular weights. Out of 198 tested markers 20 (10%) failed to amplify any part of the genome, while 178 (90%) successfully amplified. A total of 93 markers (47%) were polymorphic while 85 primers (43%) were monomorphic. The genetic distances among accessions were computed following the method of Huff et al. (1993) treating the polymorphic marker scores as dominant since the test set included polyploid guayule germplasm. The principal coordinates plot, showing the 2D relationships among the represented guayule germplasm per ploidy level, was computed and are shown in FIG. 1.

[0059] The 93 polymorphic markers were further assessed to determine marker polymorphism using individual plant samples and determine their robustness. Two to five individual plants representing each accession were used. Out of the 93 polymorphic markers, 54 markers were found to be most promising and easy to score and can be readily utilized for analyzing the entire guayule germplasm collection. An additional 18 markers were also determined as useful, though these set will need further performance validation using fluorescent labels. The other 21 markers were found to be difficult to score but may have utility in the long term.

[0060] The genetic distances among individual plant samples were determined from results of using the 54 markers. The principal coordinates plot is shown in FIG. 2. The plot shows the genetic similarity among samples of each ploidy level. The tight clustering of samples of 11591 and the low mean pairwise genetic distance (Table 1) suggest that this accession has more narrow genetic diversity than AZ-2. The diploid populations (S1 and S3) have higher mean pairwise distance values than the tetraploid accessions. These preliminary observations remain to be confirmed using larger sets of samples.

TABLE 1
Pairwise population matrix of mean population binary genetic distance

| | 11591 | 11591-6x | 11604 | 141660 | 141678 | AZ-2 | S1 | S3 |
|---|---|---|---|---|---|---|---|---|
| 11591 | 16.600 | | | | | | | |
| 11591- | 15.667 | 13.000 | | | | | | |
| 6x | | | | | | | | |
| 11604 | 65.120 | 64.267 | 39.900 | | | | | |
| 141660 | 61.900 | 57.833 | 68.000 | 56.000 | | | | |
| 141678 | 76.100 | 73.000 | 80.500 | 59.750 | 42.000 | | | |
| AZ-2 | 75.680 | 73.800 | 46.760 | 77.100 | 82.800 | 19.500 | | |
| S1 | 54.480 | 52.400 | 61.800 | 53.100 | 61.500 | 65.560 | 50.000 | |
| S3 | 52.920 | 50.400 | 60.480 | 52.900 | 56.000 | 68.840 | 49.040 | 39.600 |

[0061] Microsatellite markers have many applications in biological studies of plants, molecular genomics, and in a breeding program. They can be used to determine taxonomic classification, population structure, genetic diversity, and marker-trait associations.

[0062] First generation (F1) progenies from polyhaploid (n=36)×tetraploid (n=72) guayule germplasm along with parental materials were genotyped using microsatellite markers (SSRs) to test if possible to validate the parentage of the progenies and confirm that they arose from sexual recombination. The SSR markers used were those determined as most robust in the set (54 of 93 SSRs) during preliminary testing. Those 54 SSR markers correspond to 4, 5, 6, 8, 10, 12, 16, 18, 19, 24, 26, 37, 43, 51, 52, 58, 61, 68, 70, 71, 80, 93, 107, 108, 112, 114, 115, 118, 119, 126, 128, 132, 134, 139, 140, 143, 144, 156, 157, 158, 162, 164, 165, 170, 171, 180, 181, 183, 185, 186, 188, 195, 197, and 198 in Table 11.

[0063] The Bayesian clustering results using the marker data provided additional information about possible paternity and parental mode of reproduction. The cluster assignments of the genotyped germplasm are shown in FIG. 3. This method is originally intended for determining population structure but also adapted for this purpose.

[0064] Leaf tissues from 140 guayule germplasm were collected for SSR genotyping (Table 2). A subset of 15 guayule SSRs was used to determine the genetic similarity among breeding materials and with the USDA germplasm collection to assist the breeding program. Those 15 SSR markers correspond to 4, 5, 10, 12, 18, 19, 68, 80, 93, 134, 139, 158, 185, 186 and 188 in Table 11.

[0065] For genotyping, the M13-tailed SSR primers used during the primer testing phase were replaced by fluorescent-labeled primers which are more stable, reliable than M13-labelled primers, and gave reproducible results needed for routine genotyping.

TABLE 2
List of guayule accessions in the private and
USDA collection genotyped with SSR markers

| ID | No. samples |
|---|---|
| 11591 | 5 |
| 11600 | 1 |
| 11604 | 7 |
| 11605 | 2 |
| 11619 | 1 |
| 11634 | 4 |
| 11635 | 7 |
| 141018 | 2 |
| 141209 | 1 |
| 141298 | 1 |
| 141630 | 1 |
| 141632A | 3 |
| 141634 | 1 |
| 141635 | 1 |
| 141635A | 1 |
| 141637 | 1 |
| 141652 | 1 |
| 141699 | 1 |
| 141727 | 1 |
| 141734 | 1 |
| 141735 | 1 |
| 14M-1 | 5 |
| 14M-7 | 5 |
| 4265-X | 1 |
| 4265-XF | 5 |
| 593 | 2 |
| 8012 | 1 |
| 8062 | 1 |
| 8150 | 1 |
| 8267 | 1 |
| 8269 | 1 |
| 8272 | 1 |
| 8274 | 1 |
| 8275 | 1 |
| A48118 | 1 |
| AZ-1 | 5 |
| AZ-2 | 2 |
| AZ-3 | 2 |
| AZ-4 | 1 |
| AZ-5 | 4 |
| AZ-6 | 5 |
| CAL-1 | 1 |
| CAL-2 | 1 |
| CAL-3 | 5 |
| CAL-4 | 1 |
| CAL-5 | 3 |
| CAL-6 | 5 |
| CFS11-2005 | 1 |
| MAC31-AZ2 | 5 |
| MAC31-Sel1 | 5 |
| N575 | 4 |
| R1092 | 1 |
| R1096 | 1 |
| R1100 | 4 |
| R1101 | 3 |
| R1108 | 3 |
| R1110 | 4 |
| W6-429 | 3 |

[0066] Analysis of SSR data showed that the mean major allele frequency for the marker set was 0.3752 and the polymorphism information content (PIC) was 0.7309 indicating that the marker set is highly informative. Pairwise comparison of all the germplasm using Dice coefficient (Dice, 1945) has a mean of 0.3938, with values ranging from 0.0000 to 0.7857 (9,730 total pairwise values). The highly similar germplasm, as well as extremely dissimilar germplasm pairs are listed in Table 3.

[0067] The mean pairwise genetic distance among selected private germplasm and USDA germplasm was computed following the method of Huff et al. (1993) on dominant markers and the results shown in Table 4.

TABLE 3
Pairs of guayule germplasm with extreme dissimilarity values.
(Sample IDs are noted as i and j, while the pairwise Dice
dissimilarity value as d(i, j))

| | | | | |
|---|---|---|---|---|
| i | Accession ID | j | Accession ID | d(i, j) |

Germplasm samples that are very genetically similar

| | | | | |
|---|---|---|---|---|
| 10 | MAC31-AZ2-19 | 9 | MAC31-AZ2-16 | 0.0000 |
| 34 | CAL-5 | 33 | CAL-5 | 0.0000 |
| 46 | 4265-XF | 45 | 4265-XF | 0.0000 |
| 50 | 8274 | 49 | 8267 | 0.0000 |
| 66 | 11635 | 65 | 11635 | 0.0000 |
| 69 | R1096 | 21 | AZ-6 | 0.0000 |
| 88 | 593 | 84 | N575 | 0.0000 |
| 98 | 11591 | 94 | 11591 | 0.0000 |

Germplasm samples that are very dissimilar

| | | | | |
|---|---|---|---|---|
| 118 | 14M-1-13 (2X) | 75 | R1101 | 0.7436 |
| 118 | 14M-1-13 (2X) | 3 | AZ-1 | 0.7447 |
| 118 | 14M-1-13 (2X) | 40 | CAL-6 | 0.7447 |
| 29 | CAL-3 (2X) | 1 | AZ-1 | 0.7500 |
| 118 | 14M-1-13 (2X) | 55 | 11604 | 0.7619 |
| 140 | 141632A-4 (2X) | 112 | MAC31-Sel1-31 (3X) | 0.7619 |
| 118 | 14M-1-13 (2X) | 89 | 593 | 0.7674 |
| 131 | 8012 (P) | 118 | 14M-1-13 (2X) | 0.7838 |
| 140 | 141632A-4 (2X) | 118 | 14M-1-13 (2X) | 0.7857 |

TABLE 4
Mean pairwise genetic distance among selected USDA germplasm and private
guayule selections computed by comparing up to five plants per accession

| | | | MAC31- | | | | | | | | | MAC31- |
|---|---|---|---|---|---|---|---|---|---|---|---|---|
| | AZ-1 | AZ-2 | AZ2 | AZ-3 | AZ-4 | AZ-5 | AZ-6 | CAL-3 | CAL-6 | 11591 | W6-429 | Sel1 |
| AZ-1 | 24.60 | 21.00 | 25.20 | 30.00 | 21.00 | 23.60 | 22.52 | 34.68 | 28.48 | 34.16 | 29.13 | 28.72 |
| AZ-2 | | 12.00 | 14.40 | 18.00 | 9.00 | 19.50 | 20.20 | 35.60 | 28.30 | 32.60 | 29.50 | 24.90 |
| MAC31-AZ2 | | | 17.60 | 18.20 | 11.80 | 23.40 | 22.60 | 37.88 | 31.88 | 35.20 | 33.87 | 29.92 |
| AZ-3 | | | | 20.00 | 14.00 | 24.38 | 26.00 | 37.00 | 32.90 | 37.60 | 35.50 | 32.80 |
| AZ-4 | | | | | | 17.00 | 15.60 | 30.40 | 23.20 | 28.60 | 24.33 | 21.60 |
| AZ-5 | | | | | | 21.33 | 17.65 | 34.60 | 26.00 | 31.85 | 29.00 | 24.95 |
| AZ-6 | | | | | | | 17.30 | 33.08 | 24.36 | 29.68 | 26.60 | 23.12 |
| CAL-3 | | | | | | | | 18.30 | 27.88 | 27.28 | 17.80 | 29.28 |
| CAL-6 | | | | | | | | | 20.70 | 30.20 | 25.00 | 26.72 |
| 11591 | | | | | | | | | | 12.50 | 20.53 | 21.76 |
| W6-429 | | | | | | | | | | | 6.67 | 23.33 |

[0068] A tree representing the genetic similarity among the different accessions in the private and public collections using 15 SSR markers is shown in FIG. 4.

[0069] The SSRs will be useful in establishing a genetic linkage map of guayule and identification of quantitative trait loci (QTL). This can be the basis to develop mapping populations to determine the distribution of the SSR markers in various linkage groups the guayule. Both SSRs and SNPs will be used for estimating recombination events, establishing marker-trait association in quantitative and qualitative traits of guayule.

[0070] SSR markers may be used to anchor next-generation genome sequencing data into chromosomes. Contigs where markers were detected may be used to physically map genetic marker sequences and assess their location on the genetic map.

[0071] Information from SSR and SNPs can be used to establish genotype information for future proprietary guayule varieties. The information from both molecular marker systems will allow identity and purity testing of seed supply as well as gene flow or potential contamination.

[0072] B. Development and Testing of SNPs (RAD-Seq) Markers

[0073] Restriction-site associated DNA sequencing (RAD-seq) as a next generation sequencing (NGS) technology platform was employed to obtain large numbers of SNP markers. The potential of NGS technologies for marker assisted breeding have been reviewed in the literature and FIG. 5 is an example from Ray, S., and Sataya. P., 2014 “Next Generation Sequencing Technologies for Next Generation Plant Breeding.” Front. Plant Sci.

[0074] Four individual leaf samples of 4 accessions were received for SNP discovery project. Discovery of SNPs can be effectively performed by using next-generation sequencing (NGS) technologies. NGS technologies and the use of a complexity reduction strategy can successfully be applied for SNP discovery in large and complex genomes with no reference genome. Restriction site-associated DNA sequencing (RAD-Seq) is commonly used for SNP detection in genomes and is based on identifying polymorphism next to restriction enzyme digestion sites. Paired-end RAD sequencing was applied for detection of sequence variation and design of SNP markers. An overview of pair-end RAD sequencing is shown in FIG. 6. In section A, genomic DNA is digested with a restriction endonuclease. In section B, after ligation with a primary adapter, the fragments are sheared, then ligated with a secondary adapter. In section C, a composite mixture of variable length fragments is recovered from each restriction enzyme digestion site. These fragments are size selected, amplified and sequenced on a next-generation DNA sequencing platform using paired end chemistry. In section D, development of the genomic assembly around each digestion site is then completed bioinformatically.

[0075] To develop the RAD genotyping platform for guayule, leaf tissue samples were collected from 11591, 8150 (Cal 3), 141632A (W6-429), and 14M-1-12 (S1) germplasm to obtain 3 μg of high molecular weight DNA required for DNA library development. The DNA quality and quantity was confirmed by agarose gel as shown in FIG. 7. DNA sequencing was performed on each sample and development of RAD libraries followed. The associated statistics with the four RAD libraries are shown below. The number of sequencing reads indicates the number of short DNA fragments that have been sequenced.

[0076] Total Reads: 30,211,365

[0077] Mean Reads per Sample: 6,042,273

[0078] Median Reads per Sample: 6,488,899

[0079] Read Goal per Sample: 4,000,000

[0080] Std. Dev of Reads per Sample: 1,899,084

[0081] Number of Samples Meeting Read Goals: 4

[0082] Sequencing Coefficient of Variation: 0.31

TABLE 5

| Sample ID | NGS Reads | Read Goal | RAD Clusters |
|---|---|---|---|
| 11591 (4X) | 8,656,563 | 4,000,000 | 29,973 |
| 14M-1-12 (2X) | 6,705,768 | 4,000,000 | 24,366 |
| 141632A-3 (2X) | 6,488,899 | 4,000,000 | 20,754 |
| 8150 (2X) | 4,270,193 | 4,000,000 | 19,587 |

[0083] The sequence data for guayule was analyzed to find markers with good characteristics for downstream genotyping. There were 1,065 markers that met the required characteristics for genotyping (80 bp flanking sequence, no other markers within 50 bp). Those SNP molecular markers are shown in Table 9. A total of 970 primers were designed and tested for marker polymorphism and informativeness.

[0084] For testing, leaf tissues were harvested from five plants of 12 diploid accessions (14M-7, CAL-3, HS10, HS12, HS14, HS15, HS17, HS18, HS2, HS5, HS6, and W6-429) and genotyped. Two sets of primers were used for the initial screening of the diploid accessions. The first set of 384 primers indicate that 379 SNPs successfully amplified, 5 failed, and 3.6% has missing data. Of the 384 markers, 319 are polymorphic while 60 were monomorphic. The mean allele frequency was 0.65, the PIC was 0.28 and mean heterozygosity was 0.68. The genetic distances among the 12 accessions were estimated using the method of Nei (1972) (Table 6).

TABLE 6
Genetic distances among guayule diploid
accessions using 379 SNP markers

| OUT | 14M-7 | CAL-3 | HS10 | HS12 | HS14 | HS15 | HS17 | HS18 | HS2 | HS5 | HS6 | W6-429 |
|---|---|---|---|---|---|---|---|---|---|---|---|---|
| 14M-7 | 0.000 | | | | | | | | | | | |
| CAL-3 | 0.058 | 0.000 | | | | | | | | | | |
| HS10 | 0.068 | 0.070 | 0.000 | | | | | | | | | |
| HS12 | 0.068 | 0.066 | 0.0.32 | 0.000 | | | | | | | | |
| HS14 | 0.068 | 0.065 | 0.039 | 0.027 | 0.000 | | | | | | | |
| HS15 | 0.065 | 0.060 | 0.057 | 0.038 | 0.044 | 0.000 | | | | | | |
| HS17 | 0.071 | 0.068 | 0.039 | 0.022 | 0.039 | 0.047 | 0.000 | | | | | |
| HS18 | 0.066 | 0.050 | 0.044 | 0.034 | 0.036 | 0.035 | 0.047 | 0.000 | | | | |
| HS2 | 0.083 | 0.080 | 0.045 | 0.041 | 0.039 | 0.065 | 0.041 | 0.057 | 0.000 | | | |
| HS5 | 0.064 | 0.065 | 0.058 | 0.041 | 0.045 | 0.029 | 0.047 | 0.031 | 0.074 | 0.000 | | |
| HS6 | 0.074 | 0.063 | 0.035 | 0.033 | 0.035 | 0.034 | 0.032 | 0.042 | 0.056 | 0.026 | 0.000 | |
| W6-429 | 0.079 | 0.075 | 0.066 | 0.061 | 0.051 | 0.072 | 0.062 | 0.062 | 0.060 | 0.078 | 0.060 | 0.000 |

TABLE 7
Examples of SNP sequences discovered by RAD-Seq method

| #CHROM | POS | SEQ |
|---|---|---|
| RAD_kmer_0000025_1_TGC [symbol] | 107 | CGCCACACATAAATAATCAAACCTTATCCGTCACCACTTGAGAAAAACCCTATACA |
| | | GGGCGGCATGCCGCCACTGTCGCT[A/G]CTGCCCTGTCCGGCCGCCATTTGTTTTTG |
| | | TTTTCTGTTTCGTCTTTCTTGTTTCCTGTTCTAAAAAGACTAGGTCTAGGT |
| RAD_kmer_0000028_1_TGC [symbol] | 262 | AAATCGCAATATACGAATACCACATAAACGGAAAGAATTCGTTTATTAGTTCCTTT |
| | | ATTTATTTACTATTACGAAAGTAA[G/C]CCATTTATGGTGTTATAATGACTTAATTA |
| | | TCTAAGATACTAATACATGACTATAAATTTAAAATCTGGCTACGGTTTAAT |
| RAD_kmer_0000037_1_TGC [symbol] | 446 | TGCAGTAATTTTAGGTAGGAAGTGCAAAATATGGGTCGGTAAAAAATCGCCGGG |
| | | TCAAATGGGTCATCAACAAAACCAA[C/T]AAATAACGATAAAATGCCAATATTCA |
| | | TTACATATTAATTAATAGCATTGACATGTTCATTAAAAATTAACCAATAACCTT |
| RAD_kmer_0000038_1_TGC [symbol] | 417 | AGAATAAGATAATTGGTTCTTAGAGTTTTTTTTAGGATGCAACCAATCTGAACTGTT |
| | | GGATGGCGCAACGAATCATAATC[A/T]TTGTTTGGAACCAAAATTTGAAGACAAG |
| | | TTAAAGGGCTAGATTTTTTTTAAACATCACTAATTTTAATGATAAATATACA |
| RAD_kmer_0000047_1_TGC [symbol] | 106 | TACGCATGTACCAGGTAAAGGGTTATGAGAGTTGGGCCAAGGCACCACTCCATGT |
| | | GGGCCTAAGGTACTCCAAAAATGA[G/A]GGCTTCACTTTAGCGTAACAGGACAT |
| | | GGGTATCAAGCATCCGTGATGAAACGCAAGGTGGGCACAAGCCCACCTATTGCA |
| RAD_kmer_0000085_1_TGC [symbol] | 210 | TCTTCTCTTCTATTCAATATATGTTCTCCGTCACTAAAATTTTTATACTGTTAAAAAT |
| | | GATTTTTTATTGCCCGGGATGGC[G/A]GGATCTCACTGGAAGCAACCTCTCTATCTTC |
| | | AAAGATGGATGTAAGGCTTGCCTCCATCCCACCCTCCCAGACCCTTACT |
| RAD_kmer_0000049_1_TGC [symbol] | 339 | TTGCCTCCATCCCACCCTCCCAGACCCTTACTTTCTGTGTGGGATATTACTGGGTAC |
| | | GCTTGTTTGTTTGTTTGTTTACT[T/C]CTATAATGTAGGTATGTTGGCAATAATATAG |
| | | AACCAACCCAATTATAAAAAGAAAAAAAAAAGATCATTCGTAGTGCTAG |
| RAD_kmer_0000052_1_TGC [symbol] | 352 | CTATGGTTATCCGTGAAAGGTATAATTCTGGAACACCCTATGGTTCGGGTTATAATT |
| | | TTTACTCGGTTTGTAATCGGATC[T/A]CTGACGGGAATTTAAATCAGATTTAAATTA |
| | | TGTACACAACGGTTCCGCTAACTCGATTAATATGTAATATTAATAAACGTA |

| #CHROM | Sample_1 | Sample_2 | Sample_3 | Sample_4 | ESTA Name |
|---|---|---|---|---|---|
| RAD_kmer_0000025_1_TGC [symbol] | G | A | A | A | GYSNP0001 |
| RAD_kmer_0000028_1_TGC [symbol] | C | G | G | — | GYSNP0002 |
| RAD_kmer_0000037_1_TGC [symbol] | C | C | T | T | GYSNP0003 |
| RAD_kmer_0000038_1_TGC [symbol] | W | A | T | — | GYSNP0004 |
| RAD_kmer_0000047_1_TGC [symbol] | G | G | A | G | GYSNP0005 |
| RAD_kmer_0000085_1_TGC [symbol] | G | G | A | A | GYSNP0006 |
| RAD_kmer_0000049_1_TGC [symbol] | C | T | T | T | GYSNP0007 |
| RAD_kmer_0000052_1_TGC [symbol] | W | T | A | A | GYSNP0008 |

[symbol]

indicates data missing or illegible when filed

[0085] The second set consisted of 192 SNP assays screened against the same set of 12 diploid accessions. Another 145 polymorphic SNP markers in this set were identified. A total 464 SNPs were found to be informative from both tests which were all used to screen single sample DNA (in contrast to bulked DNA in previous testing). A subsequent stepwise testing of these markers on single plant DNA sample was conducted to evaluate the effectiveness of each marker on individual plants. Four plants per accession were analyzed (total of 48 samples). Among the 464 SNPs, only 348 were found to be polymorphic when single sample DNA was used and these was the preferred set for routine analysis.

### Diversity Analysis and Parental Selection for Crossing

[0086] Leaf tissues from 1.144 diploid guayule germplasm were collected for SNP genotyping. The 348 SNPs set was used to determine the genetic similarity among these breeding materials and with the USDA diploid germplasm collection and representative polyploid germplasm. A summary neighbor joining tree from Nei's distances is shown in FIG. 8. There are four major clusters denoting germplasm groups. The USDA diploid germplasm W6-429 and Cal-3 grouped with 14M-7 and six HS. There is a distinct group containing G7-11 (8817, 8816) and other polyploids along with HS 16.

[0087] FIG. 9 shows a detailed tree with all individual plants color coded by HS and accession grouping. Some HS are genetically uniform with the individual plants having very similar genotypes (e.g. HS 10, 12, 13, 16, 17, and 18), while others show genetic admixture (e.g. HS 2, 5 and 6).

[0088] The mean total expected heterozygosity (gene diversity) of the diploid HS from the 348 SNP markers was estimated at 0.37. The highest heterozygosity was observed on 14M-7 (0.43) while the lowest on HS 14 (0.32). FIG. 10 shows the expected heterozygosity on all SNP loci of the diploids.

[0089] The similarity between and within the diploid accessions is shown in FIG. 11. Information from these genetic relationships are useful in selecting parents for the breeding program that are genetically distant (less similar).

[0090] C. Analysis of Rate of Apomixis in Guayule Germplasm

[0091] In another aspect of the invention, the rate of apomixis of guayule germplasm is determined and used in breeding guayule, including the selection of guayule germplasm to produce an advanced guayule plant, seed or plant tissue. In a further embodiment of the invention, a method for breeding a guayule plant comprises determining the rate of apomixis of one or more guayule plants, using the resulting information regarding the rate of apomixis of the plant(s) to identify one more select guayule plant(s) for use in guayule plant breeding to produce an advanced guayule plant, seed or plant tissue. In a further preferred embodiment, the rate of apomixis is determined by flow cytometry. In another preferred embodiment, the rate of apomixis is determined from leaf samples, seed samples, or both. The invention is also directed to guayule plants, seeds, and plant tissue generated from such methods of breeding. The plant tissue referenced in these methods includes the natural rubber produced by the guayule plant.

[0092] In another embodiment, a method for breeding guayule comprises (a) determining the rate of apomixis of one or more guayule plant(s). (b) determining the genetic pedigree of one or more guayule plant(s); and (c) using the information regarding rate of apomixis and genetic pedigrees to identify one or more select guayule plants for use in guayule plant breeding to produce an advanced guayule plant, seed or plant tissue. In a preferred embodiment, the DNA analysis is performed using DNA of single nucleotide polymorphisms (SNPs) or mono-, di-, tri-, tetra-, penta- or hexanucleotide simple sequence repeats (SSRs). In another preferred embodiment, the rate of apomixes is determined by flow cytometry. In another preferred embodiment, the rate of apomixes is determined from leaf samples, seed samples, or both. The invention is also directed to guayule plants, seeds, and plant tissue generated from such methods of breeding. The plant tissue referenced in these methods includes the natural rubber produced by the guayule plant.

[0093] The rate of apomixis in guayule germplasm was studied for enhancing guayule breeding. Guayule has a range of reproductive types of populations ranging from sexual diploid plants to facultative apomictic polyploid lines. Plant improvement has been a challenge in guayule through traditional breeding due to complications from facultative apomixis in polyploid collections.

[0094] As shown in Table 8, pollen viability also can relate to whether the plant is a polyhaploid, tetraploid or a diploid.

[0095] Guayule polyploids range from triploids (2n=3x=54) to octaploids (2n=8x=144). Polyhaploids result from reduction of a 4x (4x=72) maternal plant and no fertilization. On a ploidy analyzer, when sampling leaf tissue, they can appear the same as diploids but differ in reproduction.

[0096] Polyploidy was studied during the Emergency Rubber Project in the 1940's by counting chromosomes in root-tips or pollen mother cells, with appropriate stains. Use of new research technologies and equipment provide for advancement of the understanding of polyploidy in a way that was previously too labor-intensive to be practical. An example of this is the use of a desk-top ploidy analyzer (flow cytometry) that is a fast and easy technique used to measure embryo and endosperm ploidy. Flow cytometry (or ploidy analysis) allows hundreds of plants in a population to be analyzed and the ploidy of each to be identified. Since most lines or populations are facultative apomictic, this is very valuable information.

[0097] This technique was also expanded to not only analyzing the ploidy of a plant but to also determine the rate of occurrence of sexual and non-sexual types of reproduction. This method combined with molecular markers can be a nondestructive method for identifying new genetic diversity in a guayule breeding program.

[0098] In this experiment, a novel method has been employed using seeds produced by a single plant that utilizes the combination of embryo and endosperm ploidy number to detect the type of reproduction that occurs from this single plant, referred to as the rate of apomixis. Although this method is technically destructive, the knowledge of the rate of apomixis is valuable and once it is known, molecular markers can be identified in leaf tissue to distinguish between sexual and non-sexual (apomictic) types and allow selection of plants resulting from sexual reproduction to obtain greater genetic diversity for rubber improvement.

[0099] The USDA National Plant Germplasm System (NPGS) contains 51 accessions of guayule (P. argentatum) plus accessions that are interspecific hybrids. All except two diploid guayule collections reproduce by apomixis; the two diploid accessions reproduce sexually. The objective of this study was to estimate the rate of apomixis, as well as whether or not there was meiotic reduction in the megaspore mother cell, and whether or not there was fertilization to form an embryo. The germplasm that was the subject of this study included two basic types—2 accessions of diploids (sexual reproduction) and 48 accessions of polyploids (facultative apomictic). The polypolids range from triploids (3x=54) to octaploids (8x=144). All germplasm was publically available in the Germplasm Resources Information Network (GRIN) USDA collections.

[0100] Young leaf tissue of maternal plants and 100 progeny seeds from these plants were analyzed to estimate their rate of apomixis. The seed provided additional insight due to the ploidy levels in two different seed structures (embryo and endosperm). Diploid leaf samples were prepared in UV dye as a control to calibrate the ploidy analyzer. The seed samples were chopped in UV dye to prepare the sample with a 2x leaf sample and analyzed in the ploidy analyzer.

[0101] The study sought to identify which of the four potential reproductive classes the seed resulted from: (1) meiotic reduction of egg+fertilization; (2) meiotic reduction of egg+no fertilization; (3) no meiotic reduction of egg+fertilization; and (4) no meiotic reduction of egg+no fertilization. The results potentially indicate that the earlier assumptions of: (1) embryo sac development and (2) normal meiosis in the male (pollen) are not always the case. Results from this study indicated that off-type progeny (seed) would not have been identified if only leaf samples were used, resulting in an over-estimate of the rate of apomixis for the accession. Segregation in triploids is an example of this.

[0102] For example, a tetraploid×tetraploid could involve the reproductive classes as depicted in FIG. 12.

[0103] These results can help guide a guayule breeding program and better utilize plants resulting from reduction and/or fertilization causing new recombinations. The technique will also help to better characterize new breeding lines and the expected amount of variation from generation to generation.

[0104] Seed maturity and nuclei staining was also studied. Seeds from plant heads at different stages of development (early, mid and late stage) were collected. As shown in FIGS. 13-14, results indicated that embryo ploidy was detectable at all development stages.

[0105] The USDA collection R1100-4x resulted in a 93% rate of apomixis. The USDA collection 11604-2x polyhaploid resulted in a 0% rate of apomixis. Further studies and analysis will further expand the usefulness of this technology in developing improved guayule plants and the rubber produced by such plants.

[0106] All of the compositions and/or methods disclosed and claimed herein can be made and executed without undue experimentation in light of the present disclosure. While the compositions and methods of this invention have been described in terms of preferred embodiments, it will be apparent to those of skill in the art that variations may be applied to the compositions and/or methods and in the steps or in the sequence of steps of the method described herein without departing from the concept, spirit and scope of the invention. All such similar substitutes and modifications apparent to those skilled in the art are deemed to be within the spirit, scope and concept of the invention as defined by the appended claims.

TABLE 9
SNP Molecular Markers from Guayule

| | | | Sample | Sample | Sample | Sample | |
|---|---|---|---|---|---|---|---|
| #CHROM | POS | SEQ | _1_2 | _3_2 | _2_2 | _4_2 | EST Name |
| RAD_kmer_0000025_1_TGCAGGTGGCGCGGCTGGACCATAG | 107 | CGCCACACATAAATAATCAAACCTTATCCGTCACCACTTGAG | G | A | A | A | GYSNP0001 |
| TCCAATGAGCGGCGGCGGCACGGCGGCAAAGAGTTTGGT | | AAAAACCCTATACAGGGCGGCATGCCGCCACTGTCGCT[A/G] | | | | | |
| TTGTTCTTGGATGATGACGCAAGCAAC_NODE_1_length_547_ | | CTGCCCTGTCCGGCCGCCATTTGTTTTTGTTTTCTGTTTCGTCT | | | | | |
| cov_74.769653 | | TTCTTGTTTCCTGTTCTAAAAAGACTAGGTCTAGGT | | | | | |
| RAD_kmer_0000028_1_TGCAGGTGCACCTATTCCCGCACCA | 262 | AAATCGCAATATACGAATACCACATAAACGGAAAGAATTCGT | C | G | G | — | GYSNP0002 |
| GGTAAATTTTATTTGCCGTACAAAGTTTTACTATTGTACAT | | TTATTAGTTCCTTTATTTATTTACTATTACGAAAGTAA[G]CC | | | | | |
| TAAATAATTTATAAATCTGAAATAA_NODE_1_length_500_cov_ | | ATTTATGGTGTTATAATGACTTAATTATCTAAGATACTAATAC | | | | | |
| 93.066002 | | ATGACTATAAATTTAAAATCTGGCTACGGTTTAAT | | | | | |
| RAD_kmer_0000037_1_TGCAGGCTGCAGCATGTGTCATTGT | 446 | TGCAGTAATTTTAGGTAGGAAGTGCAAAATATGGGTCGGTAA | C | T | C | T | GYSNP0003 |
| TTAACTATTATATTACTTTAAAGTTTTTACTTTGCTTATGTT | | AAAATCAGCCGGGTCAAATGGGTCATCAACAAAACCAA[C/T] | | | | | |
| AAGCTTTTGTTTACTTAAGGTTAT_NODE_1_length_583_cov_ | | AAATAACGATAAAATGCCAATATTCATTACATATTAATTAAT | | | | | |
| 88.401375 | | AGCATTGACATGTTCATTAAAAATTAACCAATAACCTT | | | | | |
| RAD_kmer_0000038_1_TGCAGGTAATTAAAAGAAAAAGTT | 417 | AGAATAAGATAATTGGTTCTTAGAGTTTTTTTTAGGATGCAAC | W | T | A | — | GYSNP0004 |
| AGACAACAGTTAGTTTCATCACATTTAAGTTCCTTTTTCAC | | CAATCTGAACTGTTGGATGGCGCAACGAATCATAATC[A/T]TT | | | | | |
| CCAAACAATTCACAGCAACAAAATTT_NODE_1_length_600_ | | GTTTGGAACCAAAATTTGAAGACAAGTTAAAGGGCTAGATTT | | | | | |
| cov_63.478333 | | TTTTTAAACATCACTAATTTTAATGATAAATATACA | | | | | |
| RAD_kmer_0000047_1_TGCAGGATTGATTGTGGCTATGGTC | 106 | TACGCATGTACCAGGTAAAGGGTTATGAGAGTTGGGCCAAGG | G | A | G | G | GYSNP0005 |
| ATGGCGGAGAGCGGAGACAAGTGCAATAGGTGGGCTTGT | | CACCACTCCATGTGGGCCTAAGGTACTCCAAAAATGAT[G/A] | | | | | |
| GCCCACCTTGCGTTTCATCACGGATGC_NODE_1_length_206_ | | GGCTTCACTTTAGCGTAACAGGACATGGGTATCAAGCATCCG | | | | | |
| cov_132.150482 | | TGATGAAACGCAAGGTGGGCACAAGCCCACCTATTGCA | | | | | |
| RAD_kmer_0000049_1_TGCAGGTACTCTTTTTAAAGGATGC | 210 | TCTTCTCTTCTATTCAATATATGTTCTCCGTCACTAAAATTTTT | G | A | G | A | GYSNP0006 |
| AGTAAGAACTAGCACTACGAATGATCTTTTTTTTTTCTTTT | | ATACTGTTAAAAATGATTTTTATTGCCCGGGATGGC[G/A]GGA | | | | | |
| TATAATTGGGTTGGTTCTATATTAT_NODE_1_length_426_cov_ | | TCTCACTGGAAGCAACCTCTCTATCTTCAAAGATGGATGTAA | | | | | |
| 113.995308 | | GGCTTGCCTCCATCCCACCCTCCCAGACCCTTACT | | | | | |
| RAD_kmer_0000049_1_TGCAGGTACTCTTTTTAAAGGATGC | 339 | TTGCCTCCATCCCACCCTCCCAGACCCTTACTTTCTGTGTGGG | C | T | T | T | GYSNP0007 |
| AGTAAGAACTAGCACTACGAATGATCTTTTTTTTTTCTTTT | | ATATTACTGGGTACGCTTGTTTGTTTGTTTGTTTACT[T/C]CTA | | | | | |
| TATAATTGGGTTGGTTCTATATTAT_NODE_1_length_426_cov_ | | TAATGTAGGTATGTTGGCAATAATATAGAACCAACCCAATTA | | | | | |
| 13.995308 | | TAAAAAGAAAAAAAAAAGATCATTCGTAGTGCTAG | | | | | |
| RAD_kmer_0000052_1_TGCAGGTATCTTGGTAACCATGGGA | 352 | CTATGGTTATCCGTGAAAGGTATAATTCTGGAACACCCTATG | W | A | T | A | GYSNP0008 |
| ACACCGCCACCACCTACTCGGTAAGGGTTGGCGGGTTATG | | GTTGGGGTTATAATTTTTACTCGGTTTGTAATCGGATC[T/A]CT | | | | | |
| GCCTCAGGTAGTTTTACCGACGAAGA_NODE_1_length_500_ | | GACGGGAATTTAAATCAGATTTAAATTATGTACACAACGGTT | | | | | |
| cov_64.052002 | | CCGCTACTCGATTAATATGTAATATTAATAAACGTA | | | | | |
| RAD_kmer_0000053_1_TGCAGGATAATGAAGAGCGGAAGC | 328 | CAAAAACCGTTATCTGCAAGGGAGGATGCATCAAAGATCAG | A | — | W | A | GYSNP0009 |
| AACACGACATATGGAAGGAATTGCAGATGGATCTCCTGA | | CATTCGAGCATGTACATGTGTTGCCAACATTGCAAACAG[T/A] | | | | | |
| ACCAGCTCTAGCTGTCAGCAGGTCAGCA_NODE_1_length_643_ | | ACAAAAGATCTCATTGATAAAGAATTATCAGCGTTTTCGTGT | | | | | |
| cov_141.555206 | | TGTCCTGATAATAGGCTTTACATGCTTCCATCCACTCC | | | | | |
| RAD_kmer_0000057_1_TGCAGGTTTCACTTTGGGATGTTGA | 86 | TATCAATTATGTCCAAAATAATGACTCTTGTATAGATTGAGTT | G | T | G | G | GYSNP0010 |
| ATCTAGCACTTGTCCCTCATTCACATCAACAAGTAGTGAG | | TGCTTCTACACTTTTAATACATTTAATGCTGATTTCA[G/T]ATT | | | | | |
| GTCACGTTGTGGAAGCTGTGGCTAGA_NODE_1_length_548_ | | TTCAACTTGATGTAAAAGGCTTTCAAGATGTCCATGCTTCTTT | | | | | |
| cov_79.206207 | | AAACAAATATCTTGCACAAGAAGAGTTCATTATT | | | | | |
| RAD_kmer_0000059_1_TGCAGGACCGAGGCCGACCTCGATA | 546 | AATATATATTTATGAAAAATGGACAAAAGTGTTTGTAGTTGA | T | C | C | C | GYSNP0011 |
| TCTGTAAACAGTTCTGCATCCAAAAACTCAGCCATGTTCT | | CTGAATTAGACTTCTACCAAATGATAAAAATCTTGCAG[C/T]T | | | | | |
| CTCTGAAGCTTTTCATGTAGTCACTG_NODE_1_length_615_ | | ATACAGTGACTACATGAAAAGCTTCAGAGAGAACATGGCTG | | | | | |
| cov_121.310570 | | AGTTTTTGGATGCAGAACTGTTTACAGATATCGAGGTC | | | | | |
| RAD_kmer_0000062_1_TGCAGGATACACAACTTTTACTTTG | 213 | GGACGTCTTTTGTGCTGGGAGCCGGTTGGAGGGTACCTACAG | W | W | W | W | GYSNP0012 |
| GGATCTTGCGATGGATGAACTTGTAGTGCCACTTCGCCGT | | GGACCACATTGTCCCAATGAGATGACGGGGTCCTACTG[A/T]A | | | | | |
| CCACCTGGTGGGTCCCCCACGTTCAG_NODE_1_length_274_ | | CGTGGGGGACCCACCAGGTGGACGGCGAAGTGGCACTACAA | | | | | |
| cov_103.233574 | | GTTCATCCATCGCAAGATCCCAAAGTAAAAGTTGTGTA | | | | | |
| RAD_kmer_0000063_1_TGCAGGTTCATAAACAAAGGTAAAT | 193 | TTGGTTCATTTTTTGTAAAGGTAAGGAAAATATTACTTCCAAC | G | K | G | K | GYSNP0013 |
| CTGCGTACATGTGTCTAGTCTAATAAAAATAATGGAATGC | | CACCATTCATCAGTTAAATGCAACTTTTTTTTTTTTT[G/T]CTTT | | | | | |
| CAATATTATAAACATTAGTAGAATTA_NODE_1_length_451_ | | ATTTGAAATCTGATAGTTTTCCATGCTCAACTTTGCAGTCAAA | | | | | |
| cov_91.121948 | | ATTGAGTCCTGATGCAGGCCATATTCTTGGTGG | | | | | |
| RAD_kmer_0000064_1_TGCAGGGTTTGGCGTTCCAATTAAT | 363 | CATATCTAATTTATTTCAATAAACCAATTGTGATGGTTGAAAA | K | T | K | T | GYSNP0014 |
| AGATGATGTTCTAGATTTTACTGGCACATCATCATCTCTTG | | CATCTGAATATATTGATCTCTTCATTTGTATCTTCAG[T/G]TTT | | | | | |
| GAAAGGGCTCATTATCTGACATTCG_NODE_1_length_580_cov_ | | TTAGTGATCAGATTCAAAATCTCTATACATTTATACTGACCCG | | | | | |
| 124.134433 | | TAATCAAAAAGGTCTCATAAAGGTTATAGCTAGT | | | | | |
| RAD_kmer_0000068_1_TGCAGGTACTCAACCTGATGATGTT | 232 | ATGGACGCAGGGTTATTGAGCGAAGCAAGTTCTTCTAGAAGC | T | G | G | T | GYSNP0015 |
| CTTGGTTTGGCAAAGAAAGGCGTTCCAAAATTGAATAGC | | TCGCGTTCTTGGTCACTAACACAACCAATATCAGCACA[G/T]T | | | | | |
| CATCCATTCGTGGCGATCATTTGTTC_NODE_1_length_520_ | | TAAAATACAGAGTGATTAGGAACAACTCATTGTACACATTTC | | | | | |
| cov_83.801926 | | CATCTAAACTTTACAAAATAATAATAATAATAATAAT | | | | | |
| RAD_kmer_0000071_1_TGCAGGATACGATGCATAAAACTGA | 265 | TGTTCAATGCGTATAGACATAGTGTAGTAATTGAATTATACA | T | A | A | A | GYSNP0016 |
| TCACCTCTAGAATAACCAGCTCTGGTCCTGCAACiAATTAT | | GTTCTCTTCTTAGGTTAATTGCATGAGAAACCGATTCT[A/T]GT | | | | | |
| ATAAAGAGCAAAAGAGAAATGATATT_NODE_1_length_610_ | | TATGCACACTAGGTGTTAGATGAAATGCCTCACTGGGATTTG | | | | | |
| cov_64.655739 | | TATGATTTTTTTACAGGAAATCTAAAATCGTCCTCA | | | | | |
| RAD_kmer_0000071_1_TGCAGGATACGATGCATAAAACTGA | 460 | ATGATGGGTGGAATGAAATTTTAAAGATTCAGAAGTTTCGTA | A | C | M | — | GYSNP0017 |
| TCACCTCTAGAATAACCAGCTCTGGTCCTGCAAGAATTAT | | GAGCAGTGGGAAAAACAATATTCTTTTCGTTCTCGGCT[C/A]T | | | | | |
| ATAAAGAGCAAAAGAGAAATGATATT_NODE_1_length_610_ | | CATTAGCTATGCATACAACAACAACACGTACGTATACTGTTA | | | | | |
| cov_64.655739 | | TGAGTCTGCTTTCTAAGTAAATTTGTTATTCCTTGAA | | | | | |
| RAD_kmer_0000077_1_TGCAGGTCCTATCTACGTTTCTTAGC | 243 | CGGACATTATTTCTGTATTTAGACTTTTATCGATCGACGTCTA | T | A | W | T | GYSNP0018 |
| TGTATCTCTAATTTATGTACCTGCAAATGTTTTTTTTTGGA | | TGTTTTTTAACTTTTCCGGCTCATCTTCCTCCGAAGC[T/A]TTC | | | | | |
| ATCCGTGATTTTCGATCATAGTCC_NODE_1_length_533_cov_ | | ATCCGAGTAGTCACTACGCCCTACCCTATCGCTGAGTCTTTGG | | | | | |
| 161.367737 | | AAGCGGTTTCACTCCTTTATAGTTACCATAATTC | | | | | |
| RAD_kmer_0000079_1_TGCAGGCCTGGTTTGTTTTGATTCGC | 95 | TGGATTTGTAATTGGAAACTCATTATAATCTTAGGGGCATAG | A | C | A | A | GYSNP0019 |
| ACTAGAAAATGACATGTTTTGACCCGTTACCCAATACCTG | | AGAAATAAACACATACTCATGATTCATAGAAGAACACA[A/C] | | | | | |
| AAGTCAACATCTTGCAAATTCTAAT_NODE_2_length_387_cov_ | | GGGATTTGCAACAAATCCGAAAAACATAAACCTGAACAGCA | | | | | |
| 52.521965 | | CGGTCTCTGTCGGTTTCATACACAGTCACACGTAAACCT | | | | | |
| RAD_kmer_0000083_1_TGCAGGTAGCTTAACGAGCCGTAGC | 91 | GGAATCTGTGTCAAAGGAGGGAATCTCCAGACTTTGATTCTC | Y | C | Y | C | GYSNP0020 |
| TTTCAGGAATACTTCCAGTTAACGAATTGTAAGACAGATC | | AACAACAACCTTATCACAGGAACAATCCCCAAGTCGAT[T/C] | | | | | |
| AAGGTAGATCATGCTGCCATTAGCTT_NODE_1_length_577_ | | GCCAGCTGCACGAATCTGATGTGGGTTTCGCTTTCGAACAAC | | | | | |
| cov_97.315422 | | AAACTCGAAGGCGAGATCCCTGAAGGCATTGGGAATCT | | | | | |
| RAD_kmer_0000089_1_TGCAGGAATGTTTATAAAACAAGGA | 273 | GTTACCCAACCTGATCGACCTGCTTTACTAAAAGGAATGTGG | C | C | T | C | GYSNP0021 |
| CTTGGTTCATTTGTATGTTCCTCTTTTTCCCTATATTATACC | | AAAACTCTCACCTGAAACACACTAGAACTCGAAGAAGA[T/C] | | | | | |
| CATGAATATAAACCATTTACATAT_NODE_1_length_624_cov_ | | TCTCCATGTTTTGTATATCCAAACCCGCAGCCTTTGCATAATC | | | | | |
| 116.897438 | | TTACAAGTATATTTGTTACAGGAATCCATGATCGGTT | | | | | |
| RAD_kmer_0000089_1_TGCAGGAATGTTTATAAAACAAGGA | 423 | CATGATCGGTTATCAAATGCTGATAAAAGTGATGTTGGCAGG | A | A | G | A | GYSNP0022 |
| CTTGGTTCATTTGTATGTTCCTCTTTTTCCCTATATTATACC | | CTAAGAGTTGCTGCTTGGTTGCTCTCAAAAGCAGCCAA[G/A]A | | | | | |
| CATGAATATAAACCATTTACATAT_NODE_1_length_624_cov_ | | ACTCCTTGTACTGAACTAATACAGAAATTGATTGCAGAAGTA | | | | | |
| 116.897438 | | GATCTCTTAGTTCTGCACTTGATATTCTCGGGTCGCT | | | | | |
| RAD_kmer_0000106_1_TGCAGGAAGTAGGTGTGAGCAGAA | 157 | ATCACCAATTTCATGTCAGTCTTCATTGCCATGATATTATTTC | C | C | T | C | GYSNP0023 |
| CATGGCCGGAACCATGGCAACCGAACCGAACAGTGAGTA | | GTTTGAGTTTGGTCCCAATACGATCATTAGGTGGGCC[T/C]CC | | | | | |
| CCACATAGACCGACCCATTTGATAATTA_NODE_1_length_618_ | | TTATAAATATTTGTCCATATTATATTACTTTGAAAATAATAAT | | | | | |
| cov_145.288025 | | TTTTTTACATAGCATTTAGCTTTAAAAAAATACGA | | | | | |
| RAD_kmer_0000106_1_TGCAGGAAGTAGGTGTGAGCAGAA | 404 | CAAACATAAGTACACACACATACACATATATACATCAGAACA | C | S | C | G | GYSNP0024 |
| CATGGCCGGAACCATGGCAACCGAACCGAACAGTGAGTA | | CACATAAAAACACACATATCAATATACACACACAAGCA[C/G] | | | | | |
| CCACATAGACCGACCCATTTGATAATTA_NODE_1_length_618_ | | ATGGATACATACCTACAACTCAGAATGCACAGATATGCATAT | | | | | |
| cov_145.288025 | | CAGCATATTTCATATTCGGGTCTAGGGGTTCTAACCTA | | | | | |
| RAD_kmer_0000108_1_TGCAGGTCATATCCACTGAACATCA | 330 | ATTGCAGATAGTGAGGTTTATTTATTTGTTTGTTGTTGCATTTT | G | G | T | G | GYSNP0025 |
| AAACAATCTAAGAAATCAAAAACTACAATCTTCATAAAA | | ATTTATTTTATTTGGTTTATGAATGAAAATTCGTCT[G/T]TTAA | | | | | |
| AAGAACAACATTATCTCCATTGATGTT_NODE_2_length_471_ | | GGGTTTATGGAAATTCGTAAATGACCAACAGTATTGTATTTA | | | | | |
| cov_47.454353 | | TTTTATCATAAAGAATTTAATTTTTTTTATTTT | | | | | |
| RAD_kmer_0000117_1_TGCAGGAAAGAGAAGGCCAAACGA | 106 | GGACCAAGTCTGCACCAAGAATAGCTCGCACAGACGTTTTTT | — | A | R | A | GYSNP0026 |
| GGTTGTGATTGGCGAGCCAGTCGTAGAGAATAGGGACCA | | AATGAGACGTATTAGAGAAAACAAACAGTCTACAGATG[A/G] | | | | | |
| GAGACTTCCACTGTGTGTAACGTTCGTT_NODE_1_length_435_ | | CAATGTATGCGCGTGGTCTGCGCGGCGCAGACATAAGAGCCT | | | | | |
| cov_46.694252 | | GAGCAAACATTTTTTAAAAAAACAAACACCACCGTAAT | | | | | |
| RAD_kmer_0000121_1_TGCAGGGTCCTCAAATAATTCAGCA | 125 | GGAGACAAATAAATCCCGGCTCCATAAACAAGTTGTTTTAAC | G | R | R | R | GYSNP0027 |
| GGATCCACAACGTTGCCAAAATTGTGGAGCTTATGCAAAT | | GATTCTTGACTTGGAGAAACATTGCCCGGTAACAAATC[G/A]G | | | | | |
| CTCTATTGCAACATCTTACTTGGATC_NODE_1_length_538_ | | CTGATGCAATCGATCCTTCAGAAAGATCATAAACCGAAACCA | | | | | |
| cov_211.905197 | | TTTTCCCATATGTTACAACACCGATTCTTGTTGTGGG | | | | | |
| RAD_kmer_0000121_1_TGCAGGGTCCTCAAATAATTCAGCA | 181 | AGAAACATTGCCCGGTAACAAATCGGCTGATGCAATCGATCC | C | T | T | Y | GYSNP0028 |
| GGATCCACAACGTTGCCAAAATTGTGGAGCTTATGCAAAT | | TTCAGAAAGATCATAAACCGAAACCATTTTCCCATATG[T/C]T | | | | | |
| CTCTATTGCAACATCTTACTTGGATC_NODE_1_length_538_ | | ACAACACCGATTCTTGTTGTGGGTGGAAGTGAATCCACAAAT | | | | | |
| cov_211.905197 | | GCATGTAAAGAACTCTGCAGATGTTGAAGATGCGGTT | | | | | |
| RAD_kmer_0000129_1_TGCAGGTACGGTTGTCGATTCCAAG | 372 | AAAAATTAGTTCCATAAAGGGTGAAATTCAAATTTTGACGAT | T | T | C | T | GYSNP0029 |
| ATATGTCATCCCACAGAGTTTGATTTCTACCTGTGCAGCC | | AAAGACAGACAGACATACGTGTAGCACAGGTTATTTGT[C/T] | | | | | |
| ATGCTGGCATTCAAGTATGTATTCAT_NODE_3_length_460_ | | AGTGACTGCAGAGCATCCGCTTGGAACTTGTTCTCATCCCAG | | | | | |
| cov_38.752174 | | AGCACATGGTAATGGGCTGGGCGGCTAGTACCCTGTTC | | | | | |
| RAD_kmer_0000138_1_TGCAGGTGGCTTTTTACTTTGACCCT | 320 | CAGGTCGGCAGGTTAATTGGGTTGTAAATGGGTTGGTCAGGT | T | C | T | T | GYSNP0030 |
| TTGATTTTAGTTCTAAATAATAGTAATTTCTTGATTATCTT | | AAAAGGGTTGCACTTATTATTTATATTTTGTTCTACAT[T/C]TT | | | | | |
| GATTCCAACAAAAACCTTCTAAAT_NODE_1_length_632_cov_ | | AAACGAGAGGGAGTTCAAATCCTTTATCCACAACCCAACCTA | | | | | |
| 100.169304 | | CGACCTGTCTATCATACCAGGCTTGGCGGTGTCATG | | | | | |
| RAD_kmer_0000140_1_TGCAGGAAGTAGGGGCGAGCAGAA | 123 | CCTATGAAAACATCAACAATTTTAAGTTTTTAACTTTAAATAT | C | T | C | T | GYSNP0031 |
| CAAGGTCTGAACCGTAAGAACCATGGAACCGAAAAGTGA | | GTAGTTACATAGAAACAGTTAGCCCTATATTCTACCA[C/T]AT | | | | | |
| GTACCACAGTGACCAACCCGTTTGGTAA_NODE_1_length_461_ | | ATGCAAATGAATATGTAATTTGAAAATTACCATAGACATTTA | | | | | |
| cov_58.613884 | | TCAGATGGGGCAGACCCTGAGTAAAAGGTTGAAAGA | | | | | |
| RAD_kmer_0000141_1_TGCAGGATGGAAAATAGAAGCATT | 309 | CTCATGACACGGTAGAATTGGCCAGATGTATTGAAAAAACCA | A | — | A | W | GYSNP0032 |
| CCAAAGAGCTCCTCTAGCAACCATCACAGACGAGGCGCC | | TGGTGTCTGCGGTAGCCGTCCATGGAAGGTAATAATGT[A/T]A | | | | | |
| TACAAAAAAATGTTATTGCACATTCAAA_NODE_1_length_638_ | | TATATAATATTATTCATGTGATAAACTTTTCTTTTTAATTTTTAC | | | | | |
| cov_81.354233 | | AGTTTGGTAATATATTTTTATATATTTTGTTAAGT | | | | | |
| RAD_kmer_0000141_1_TGCAGGATGGAAAATAGAAGCATT | 407 | TGTGATAAACTTTTCTTTTAATTTTTACAGTTTGGTAATATATT | C | — | T | C | GYSNP0033 |
| CCAAAGAGCTCCTCTAGCAACCATCACAGACGAGGCGCC | | TTTATATATTTTGTTAAGTGAATCGCAGAAGAGTTG[T/C]GGA | | | | | |
| TACAAAAAAATGTTATTGCACATTCAAA_NODE_1_length_638_ | | TAGACCAAGAGATCCTGCTAATTGGAGTGAAATCGCAAGTGT | | | | | |
| cov_81.354233 | | TGTAGATGCTCTTGCTATACCCGTCATTGCCAATG | | | | | |
| RAD_kmer_0000146_1_TGCAGGTACCTTCCGACGACATGTC | 407 | CTGTATATGATGGCAGGAGCCATAGTCATCACTCATCACCTA | — | G | A | A | GYSNP0034 |
| GTCTTCAATCGGACAAAACCATGACGTAAGTCAAAAGTTT | | CCATACTTCATAATTTTATTTTTAATTTATTTAATCAT[A/G]AA | | | | | |
| CTGGCCAGGATCTGCAACCCCATTTC_NODE_2_length_543_ | | GTAGTAATATTATAAGACCACACATATCTTCATCCCACAGTT | | | | | |
| cov_35.797421 | | GCTGTCACAGTCAACAAAGCACACCACCTCCACCAC | | | | | |
| RAD_kmer_0000155_1_TGCAGGTCATTGCATCATGGGAGAA | 116 | TTAATTATCTGGTATTTTATTTATCAAGTTCTATTAAATTATTT | T | T | G | T | GYSNP0035 |
| GAGATTGCTGGCTTAAAACACATGTTTAAGATGATAGATA | | GTAAAAACCTACAACTATACGAGTTTTAGTGAGTTT[G/T]CTA | | | | | |
| TAGGCAACATTGGTTACATTACTTTT_NODE_1_length_581_ | | TTTATTTATTATTTTTCTCTGTCTTTTAAAGAATTTATGTTGTT | | | | | |
| cov_80.139412 | | ATTTATTATTTATTTTATTTGTTTTAAAAAAAT | | | | | |
| RAD_kmer_0000163_1_TGCAGGCAATATGACCTCAGAAGTC | 146 | CTTCATGCAAATTGTGCCATTTTGTTGGCTTGTTATGTATGTG | G | R | R | R | GYSNP0036 |
| TTAACAGTATTTACATGTAAAATATTAATGTTTGCATTATG | | TAATTTGTTTCTCGAAAACTAAGTTTGGTATAAATGT[G/A]TG | | | | | |
| TCCACAAACTCAATTTTCAACAGGT_NODE_2_length_360_cov_ | | ATATATTCTTTTTACTATATTCTCCTAAAACGCATGCTTACTCT | | | | | |
| 53.000000 | | TTGTAGCATTTGCATTATTTTACCATGTATTTCC | | | | | |
| RAD_kmer_0000169_1_TGCAGGCTGCAGGTTCTAGTGTATT | 296 | ACTTGCATACTTTCTTAAAATGGTTTGTAATTTTTGTCATCATT | T | T | C | T | GYSNP0037 |
| TATCCTAGAAAATCTAGGAATTGCTGTTCAAAAAGAAAA | | ATGTTTAAAATAGTTAAAACTGAGAAAAAAAAGTAC[C/T]AT | | | | | |
| AAAAAATCAGGGTATGTACTACTAGTA_NODE_1_length_402_ | | TAGCAGGCATACCCGAGCTTTCATCATTATTAGATTTTTTACT | | | | | |
| cov_60.300995 | | AGTAGTACATACCCTGATTTTTTTTTTCTTTTTGA | | | | | |
| RAD_kmer_0000171_1_TGCAGGAATGAGTCTATATAGGGAA | 359 | GATTTTGTTAGAATGTATTGATATTTTGACATTTCCATATAAA | G | G | K | T | GYSNP0038 |
| GAATGGAAGATTGTAAAGTATCAGTACTCTTGCTTTACTA | | TCTTATAGGAACCAGATGCAGCTGTTTCAGTACTTGG[T/G]GA | | | | | |
| AAATTGAGTGATTAAAAACAATATAT_NODE_1_length_528_ | | AATGGATGCTTGGATTATTTTGCCCTTTTTCTTGCAAGGAGGC | | | | | |
| cov_103.505684 | | CGTTTCACCATTGATGACGTGCATTATGTAGCTGA | | | | | |
| RAD_kmer_0000171_1_TGCAGGAATGAGTCTATATAGGGAA | 451 | TTGGATTATTTTGCCCTTTTTCTTGCAAGGAGGCCGTTTCACC | G | R | R | A | GYSNP0039 |
| GAATGGAAGATTGTAAAGTATCAGTACTCTTGCTTTACTA | | ATTGATGACGTGCATTATGTAGCTGATTCTGATAGGT[A/G]CT | | | | | |
| AAATTGAGTGATTAAAAACAATATAT_NODE_1_length_528_ | | ATAAACTGAAATATATTGTTTTTAATCACTCAATTTTAGTAAA | | | | | |
| cov_103.505684 | | GCAAGAGTACTGATACTTTACAATCTTCCATTCTT | | | | | |
| RAD_kmer_0000172_1_TGCAGGTTAAAGACTCAATGAGCAT | 109 | AATTTCATCAGACAAAACATAAACGCAGCCCAAACTAGCACA | Y | Y | T | C | GYSNP0040 |
| TTGGCATTTGCTCTAGTATTGTTTAGCTGGGATGATGTCA | | AGTTCCTAGCTACATATTATTATACATTACTACAGTTT[T/C]CA | | | | | |
| TATTCTTGAATGTTTACCTATTTTA_NODE_1_length_604_cov_ | | ACCTATTCCCACGGTCCCTTAAAAGTTGAAAGAAAAGGGGGA | | | | | |
| 170.134109 | | ACGTTAACCTGCTTGTGCCAAAATGGGTCGAGTAGG | | | | | |
| RAD_kmer_0000172_1_TGCAGGTTAAAGACTCAATGAGCAT | 344 | TGACCCAACTCACCTGGAGAGAAGTCTCGAGTGGTGAAGAG | A | M | M | A | GYSNP0041 |
| TTGGCATTTGCTTCTAGTATTGTTTAGCTGGGATGATGTCA | | GCAGCGACCTTTGTCTGGAAGTGTGGAAACTGATAAACC[C/A] | | | | | |
| TATTCTTGAATGTTTACCTATTTTA_NODE_1_length_604_cov_ | | CGGTCATGTTGCAGTAGCCTTTGTAAATCTTCCATCGTCAAA | | | | | |
| 170.134109 | | ACCAGAAAGCTCTAGTCTGCCTAGCTGGCGATACAATT | | | | | |
| RAD_kmer_0000174_1_TGCAGGTCGACTAAAGCTGCTCAAG | 231 | CTTATGCGAGTATCCCAAACATATAATTTTCGAGTTCGTCAGG | T | — | C | T | GYSNP0042 |
| AGCCCAATCACAGAGAACCATTAAAAACTATAAGGTATT | | CAGTTTCTCAAGCCTCCGACAGCCTTCAAGCTCCAAC[C/T]TT | | | | | |
| CCGTCTCTCAGCTTACTTTTAGTTGCC_NODE_1_length_658_ | | TGAGTTCAAATGTAGTAACAGTCACTGCATCATCCACCAGC | | | | | |
| cov_66.031914 | | AGATCAGTCCATAGATCAGATCCCCATCATCCACCA | | | | | |
| RAD_kmer_0000174_1_TGCAGGTCGACTAAAGCTGCTCAAG | 496 | TGTGCTAAATTTCATTATTTGTTAACTTTCAAAGTCAAAACTT | Y | — | T | C | GYSNP0043 |
| AGCCCAATCACAGAGAACCATTAAAAACTATAAGGTATT | | TGTTTACTGTAAAAATTTACACCAGCTTAGTTTTGTT[T/C]AAC | | | | | |
| CCGTCTCTCAGCTTACTTTTAGTTGCC_NODE_1_length_658_ | | TTTAATCATATATATATTTTTTTCTAATTTAATTATCCATTTTC | | | | | |
| cov_66.031914 | | AATAAAGTAACCCATTCTTATATCAGTTTCAAA | | | | | |
| RAD_kmer_0000181_1_TGCAGGTTCCTCTGTTAGAGCACAT | 356 | CACAATCAGAAGCTCTCTCTCATCTATTTTACATATCAACCTT | R | G | R | G | GYSNP0044 |
| GGCCTAACTATCGTATATGGAATCCCGCTTTCCCTAATCA | | TTTATCAAGTAAACCGCTCGTATTTTCCTCATCCTTG[G/A]TTG | | | | | |
| AATCCTCCCCCTGTTGACAAATTGAC_NODE_3_length_501_ | | TTTTTATATATCACCCTAGTCTTGACCAATTTTGAGCGAGATG | | | | | |
| cov_56.355289 | | TGCATGAGGCGCCACCTTAAGGTTCTGTGGCGT | | | | | |
| RAD_kmer_0000189_1_TGCAGGCGTTTACCAGTGCCTATGT | 448 | TTGATTTCAGTTGTCTTTTATTCCAGCTTATTTCAGGTT | A | A | W | W | GYSNP0045 |
| CATATAAAGCCACATGTTCTGAATACCCGCTGGCCAGAAA | | CGGACAACGGTTTGCTAAAACTGTATGATATTCAGCA[A/T]AT | | | | | |
| CAATTCATCCACTGAGTTGACATGGA_NODE_1_length_589_ | | TCCTTCAACAAACAACGGTGTTTACCCAAGTGGCGCCTCTGTT | | | | | |
| cov_128.200333 | | TCCTTTGATGAGTTTGACCAATTGACATCTGTCCA | | | | | |
| RAD_kmer_0000191_1_TGCAGGGTTTGAGAACTGGAAAATT | 431 | TCATCGTTTGATTGATCTTGCTCTTCATCCTGACCAATGACTA | C | Y | C | T | GYSNP0046 |
| TGGCGATCTGCAAAGCGGCAATTAGGATTTTCTTTGAGGA | | TGAACTCGTCATCCCGATTATTATTCAAAGTCAAAAC[C/T]GG | | | | | |
| AAGAATTGGAAGATAAATGGAAGCCA_NODE_1_length_507_ | | TTCATCACTTGGCTTCCATTTATCTTCCAATTCTTTCCTCAAAG | | | | | |
| cov_137.633133 | | AAAATCCTAATTGCCGCTTTGCAGATCGCCAAAT | | | | | |
| RAD_kmer_0000192_1_TGCAGGCTCATAAAATTACGTAAAC | 413 | AAGCGTACCATAATGTGACCCCTAGGTCTCATGCGCCAAACT | — | A | W | A | GYSNP0047 |
| GCCACGTGGTACTCTAGCGATGAGTTGCCAAATGCGTATG | | CACCGTCTCATGCACCAAACCCTCAACCTCCTATGCCA[A/T]T | | | | | |
| TGTGTGTGTGTATGTGTATATATGTA_NODE_1_length_537_ | | AGTTTCCATCTCTTGGGCCATATGGCGCAACACATAGGATCC | | | | | |
| cov_134.858475 | | TACCCTGTATATATGTACATATATACACATACACAC | | | | | |
| RAD_kmer_0000192_1_TGCAGGCTCATAAAATTACGTAAAC | 466 | GCACCAAACCCTCAACCTCCTATGCCAATAGTTTCCATCTCTT | — | T | K | T | GYSNP0048 |
| GCCACGTGGTACTCTAGCGATGAGTTGCCAAATGCGTATG | | GGGCCATATGGCGCAACACATAGGATCCTACCCTGTA[T/G]AT | | | | | |
| TGTGTGTGTGTATGTGTATATATGTA_NODE_1_length_537_ | | ATGTTACATATATACACATACACACACACACATACGCATTTG | | | | | |
| cov_134.858475 | | GCAACTCATCGCTAGAGTACCACGTGGCGTTTACGT | | | | | |
| RAD_kmer_0000194_1_TGCAGGAATATTATCCAGCAAATAG | 241 | AATGTCATGGTGTCCAGATTCTCAAAAGAATATGCTCGCTTT | W | T | W | T | GYSNP0049 |
| CTGTCATGCTTTTAGAGTTTCTCATGTTGATGT | | ACAACTAAAGGCAATGAATCACTTGATAGACCATTGTTGCTGGC[A/T]A | | | | | |
| ACCTGTCTTGACCCGTAACCAAACC_NODE_1_length_615_cov_ | | AATGTGCATATTGTTCCACCACATGGGCCTGTTTTTGAGATCC | | | | | |
| 77.027641 | | GGGTTCAGGATGGTTATGGTGCAAGATGGTCCTTAA | | | | | |
| RAD_kmer_0000194_1_TGCAGGAATATTATCCAGCAAATAG | 326 | GTGCATATTGTTCCACCACATGGGCCTGTTTTTGAGATCCGGG | G | A | G | A | GYSNP0050 |
| CTGTCATGCTTTTAGAGTTTCTCATGTTGATGTAAACAACT | | TTCAGGATGGTATGGTGCAAGATGGTCCTTAAACCC[G/A]AC | | | | | |
| ACCTGTCTTGACCCGTAACCAAACC_NODE_1_length_615_cov_ | | CAAGGTATGCATCATGCATGCACACACGATTTTAATGACTCT | | | | | |
| 77.027641 | | TGGTTTATCTCTTTTGTAATAATGTCCGGGCTTTCT | | | | | |
| RAD_kmer_0000195_1_TGCAGGAAGCTATGCTGATCTAATT | 153 | TGTGAAGCTTGTTGTATAGCTAGAAGTCGGCACCAGCACCAC | Y | T | Y | Y | GYSNP0051 |
| CACAGTCTCTCCATTGGAGTAATCAAATCAGATAGATAGT | | AAACACCTAAACAATCACCACAAATATCGAAAAGTTGT[T/C] | | | | | |
| GTGCATGTGTTTAGATATCAGATTTG_NODE_1_length_591_ | | ATCAACTTCTTCCCTACATAAAATGCATAAGAAAATTAGTAA | | | | | |
| cov_153.962769 | | TTTGGGGAAGTCAAAGGTATGTGCATGCGTAAATTACA | | | | | |
| RAD_kmer_0000198_1_TGCAGGTAACAATTTCGAACTTATT | 233 | AAAATTCGGAGGGTCGGGCGACCCCCTTCCCCCCAAGAAGCT | T | C | T | Y | GYSNP0052 |
| GATACATACCTCATGATGTTGGAGCGCTCTAGTAGTTGTA | | ACGCCAATGGGCCGATGAGTCTCTTCAAATTTCAACAA[T/C]C | | | | | |
| ACCCTGGTATGACTTGTATACAAACG_NODE_1_length_612_ | | CCTTTGTTTTGTTCGTTCGATCAGTGTGCTGAGCTTAAAGCTG | | | | | |
| cov_94.674835 | | CTGATATGTATAGTTAATTACTAAAATAGACCAC | | | | | |
| RAD_kmer_0000211_1_TGCAGGGTCTATATAGGTAAGATTA | 164 | ATAATTATGCACTCAAATTTCTAATATCTTACATCTATGACAC | A | A | G | — | GYSNP0053 |
| TGAATGCTTTACGTGATCCCAGGTTTATCAAGATCTGTGT | | CTAAAAGAATAAAAAATAGTAATGCGTCATCGGGTTG[G/A]G | | | | | |
| GTATGACTAACGGGCGGGTGGATGTT_NODE_1_length_231_ | | TCGGTCCCTAGTATCACTAGAATGTTGAATTACAAACCCTTTG | | | | | |
| cov_78.406929 | | ATGTAGGCTCAAGTTGAGTAGCTTCCAAAGAAAATA | | | | | |
| RAD_kmer_0000219_1_TGCAGGCGACGCGGCGTAGGACCG | 333 | ACAGAATAAAAGGCTAAATTGATTGTTTATGATGCAACGACA | — | A | C | M | GYSNP0054 |
| AAGTCCAATAAGCGGCTGACTGAAGTCAGCGGCAATAAA | | CCACCTCAGCCGCTATGCCAGGCACACATCGTATTCCT[C/A]A | | | | | |
| AGCAAAACCGTAGTCCAAGAGGCAGACC_NODE_1_length_ | | AGTTGTTCCTTGCTCTCATGCCTCCACTCTTTTTGTTTTTTTCT | | | | | |
| 460_cov_92.858696 | | TTTATTGTGCCGACTTCGGTCTGCCTCTTGGACTA | | | | | |
| RAD_kmer_0000227_1_TGCAGGTACAAAACATATTCTATTA | 227 | CCCCCATACCGCCCACCGCCATCAGTCAATCATCTACTTTTCT | G | T | T | T | GYSNP0055 |
| ACAAATTAATGATGCTTGAAAGTCTGATCCTTCTGAAAAA | | GAATCAATTCTCCAAATCACTTTGTAAGTTTCTGTA[T/G]CCA | | | | | |
| ACAAGATGTCTCAATTAAATAAACTC_NODE_1_length_415_ | | TCATATGTTTGTTGTCAATTAACAAAAAAATATATGTCAATCG | | | | | |
| cov_100.260239 | | CATGCAACTGGAATGATTAACAATATTGACAAAG | | | | | |
| RAD_kmer_0000229_1_TGCAGGATTTGAACTCCCAACCTTT | 225 | AGTTAAGGACCAATTAACTCTGGATCATGCGTAATGCGAGAA | G | G | A | G | GYSNP0056 |
| TGGTTGTGGAGTACATCACTTAACCATCAGGATGTCCCCT | | AACTGCCCAAAAACATATTTGTGTGTAATGCAAGGCGG[A/G] | | | | | |
| TGGGGACAGTAGTACATACCTATATC_NODE_1_length_545_ | | CACTCTTTTATGTTTAAAAGATATATGAGGTTATAACTTATAA | | | | | |
| cov_83.005501 | | GCATTTAAATGCCTTTGTTGTTGCAACATGCCTGGTG | | | | | |
| RAD_kmer_0000229_1_TGCAGGATTTGAACTCCCAACCTTT | 370 | TGCAACATGCCTGGTGAGGAGTCCAGTAGATCACCAAGAGCA | T | T | A | T | GYSNP0057 |
| TGGTTGTGGAGTACATCACTTAACCATCAGGATGTCCCCT | | ACTCTTAACTCAACAACTGTTAGACAATTGACAGCCAT[A/T]T | | | | | |
| TGGGGACAGTAGTACATACCTATATC_NODE_1_length_545_ | | TGTTAGGGGTTTCTTTAAGCTCACTTCTTTTGTGAGCGGATGC | | | | | |
| cov_83.005501 | | TAGTGAGCTGATATAGATTTGAACAATAAGATCACT | | | | | |
| RAD_kmer_0000235_1_TGCAGGGCGAGATTCAATCCACCAT | 259 | TCAGCTGACAAGAGCAAGTTTAAGGTTTGTAAATGGTTTCTC | T | Y | T | C | GYSNP0058 |
| TTTCTTCCTGATCAAAATACAAAAGCTGCACAAAGTTGAA | | TTGTTAAACACAACTTTGCCGAATATAATCTAATTT[T/C]A | | | | | |
| GACTTGGGATAAATACAGGACATTAT_NODE_1_length_587_ | | AAGTTATAATGTTGTATAGGTGTAGGTGTAAGGTTTGACCTA | | | | | |
| cov_73.243614 | | TTTACTAGTGAATGAGTTGATTCACGTTATTTTTATC | | | | | |
| RAD_kmer_0000235_1_TGCAGGGCGAGATTCAATCCACCAT | 327 | ATAATCTAATTTTAAAGTTATAATGTTGTATAGGTGTAGGTGT | C | Y | C | T | GYSNP0059 |
| TTTCTTCCTGATCAAAATACAAAAGCTGCACAAAGTTGAA | | AAGGTTTGACCTATTTACTAGTGAATCAGTTGATTCA[C/T]GT | | | | | |
| GACTTGGGATAAATACAGGACATTAT_NODE_1_length_587_ | | TATTTTTATCGCTAGCAGGTCAAAAGTTGCTCGAAGTGTAAT | | | | | |
| cov_73.243614 | | ATTAAACCTTTACTAAAAAAATATATATTGTTATTA | | | | | |
| RAD_kmer_0000239_1_TGCAGGCTTGTGATAGCGAAGAGG | 382 | TTTTATACATGAAAAAGATGAGCTGTTCGGAGGGAACCCTAG | W | T | W | T | GYSNP0060 |
| ACGGTTTATTTGGTTTTGACTTGCACAGTGATGGTGACGG | | GACCGAACCATTTGTACCCAGTTCATGATTTTTTTCGT[A/T]TT | | | | | |
| CAACAGGTGATAATTATTTCTTGAAAA_NODE_1_length_540_ | | CTTTGATTCCAGCATTCAGGTGCCTGTTGGGGAAGAGGGTTA | | | | | |
| cov_162.622223 | | TGAAAAAATTCGCATTTTGACAACATTTACAGCGAA | | | | | |
| RAD_kmer_0000240_1_TGCAGGGACGCTTGTACTTATTGCA | 432 | TAAACAATAAACAAAGTAGGGGTGGGCAAAGTTTGGTTAAA | G | A | G | R | GYSNP0061 |
| TTAAATGTAATACATATGACGATTATTAACCCATTTCTTTC | | ATCACATGATCTAAAACATGCTAACTTCAGATTTTGGTT[G/A] | | | | | |
| TCTCTTCAAGTTCGGTATAATGAAC_NODE_1_length_515_cov_ | | ATTTTTAGATTCGGTTAGGTTCATTATACCGAACTTGAAGAGA | | | | | |
| 105.728157 | | GAAAGAAATGGGTTAATAATCGTCATATGTATTACAT | | | | | |
| RAD_kmer_0000241_1_TGCAGGCTGCAACATATTATGATAA | 268 | AAAGGTAGATTTTATCTATATCCGAAAATTTAAGAGACAAAA | T | C | T | C | GYSNP0062 |
| AGATTTATGCGTACATATATTACATATGCATACGTATGTC | | CTAGTTGGAGTAAAATAGTGGTCCGAAAAGGGTAAACA[T/C] | | | | | |
| TGGATATATAGAAAGAATAATCCTCG_NODE_1_length_438_ | | AGTTCAGAAGCAAGCAAGCAAGGCTGACGCATTGCTTCTGGC | | | | | |
| cov_69.773972 | | ATCCTCTTCATTCATCTATATAAATCTATGGACAATAT | | | | | |
| RAD_kmer_0000243_1_TGCAGGTTTGACCATCTTTTGCTCG | 467 | CTGCATATAGTTTGATATATGTATTTCACTCGTTACTATGCGC | C | A | C | M | GYSNP0063 |
| AATTTCTTAATATTCGTTTATTATTATTATGAACTTTTGTT | | CTACGTAACCGAAAATTCCATTATAGCTAACAAAATT[C/A]AT | | | | | |
| GTGAATACACTAGTTACTTAAATTA_NODE_1_length_579_cov_ | | GCAACTTTTAGTCAAAACGTCTATGATCCGTTCTTCACGGCCA | | | | | |
| 112.160622 | | ATTAATTTAAGTAACTAGTGTATTCACAACAAAAG | | | | | |
| RAD_kmer_0000248_1_TGCAGGGTATGTATGTAATAATTGG | 117 | GCCTATAGTACATTTACCTCATTAGTCCACTTGATTTCTACTC | — | W | W | W | GYSNP0064 |
| ACCAATTGGGCTAGAGCCCTTAGTTAACAAAAGAACAAT | | ATTAGTTCACGTGTGCTGTTAAAAAACAAGAGTTTGA[A/T]TA | | | | | |
| ATTGATTAATGTAGGAGTTTGGTTGAT_NODE_1_length_553_ | | GTTTCATTGGTAGCACACTCACCTAATAAAACATAGACCAGG | | | | | |
| cov_106.108498 | | TTCTTTTTTCATAGAGAATATTTAAACACTTCTTTC | | | | | |
| RAD_kmer_0000251_1_TGCAGGAGCTAAAAGGAGAGGTCA | 125 | CTACAAGTAATTAACAACAATATAGTCATCAGAAGTTGCAAA | A | C | A | A | GYSNP0065 |
| ACACTTACCAGTTATAGTAGGTAAGCTCCCCCAGGACAGC | | AGTCATATGTGGTAAATTATATTTCACAAATGTCAAAA[A/C]T | | | | | |
| TCCTTAGGCGGGAACTCTTTTCCTATA_NODE_2_length_379_ | | CACCGACTGCCAATATAATTATTATCATGTCCGAAAGATAAA | | | | | |
| 16.308706 | | TTAAGAAAATAGATTAAATACAGATGTGACGTTAAAA | | | | | |
| RAD_kmer_0000254_1_TGCAGGCATACCTGAAACATAGCTT | 456 | TATATATTTCATGTTTAAAATATTTCGAACTTATCAATCATAT | A | W | W | A | GYSNP0066 |
| CTTCAACGTCCAAACACATTGTTTCAAAGTTTAGGTATGC | | GTTTGTTTACATCAATGCTTAACTGTGTTGTGTTTTT[A/T]TCC | | | | | |
| ATTACCAACCCATGCAATACCTTTAA_NODE_1_length_637_ | | TACGAAAACAACCTTTTAATAGAAAGAATCATTGTTTTTTCA | | | | | |
| cov_150.795914 | | GGTAGTATCTTGGTGTGTTATCAAGCAACTCAATA | | | | | |
| RAD_kmer_0000262_1_TGCAGGCAATGAAAAAATGAATGTT | 84 | AGTTCAAACGTGCAATTAACTCGTCGTGCCATGTTGGACAAA | Y | T | C | C | GYSNP0067 |
| TGCTTTAGCATAGATGCCAATGGTATTCTTGATGTATCGG | | CCAGAAATGTCCATCAAAAACAATACATACTGTCATAC[C/T]G | | | | | |
| CTAAGTTGGTATCTACTGGTAATGAA_NODE_1_length_471_ | | TGGCTATGATTATAGGATTATAAAAGTTCACAAAAAAAAAAA | | | | | |
| cov_37.197453 | | ATTAGTATTATAAATTAAGTAATCAAGTTACTTGCCT | | | | | |
| RAD_kmer_0000264_1_TGCAGGTAATTCAATCATGGGTTTA | 157 | TCCGTGAAAAATTACCAAAATAGTCAAAAAGTTAGACCAAA | M | M | C | M | GYSNP0068 |
| GTTTAAAAATTAGGACTGGCAAAACCGGTTCAATTATGTT | | GAATGTCAAAAAATAGACATAAAAATTTAGCCTTCACCA[C/A] | | | | | |
| AAACGGGTAGAGACGATGCTATTAAC_NODE_1_length_554_ | | AGTAGTCCCTCATTTCCTCCAATCAGAAGCCGCCACATCAGC | | | | | |
| cov_126.796028 | | TCTTGTTGGCTTACATGGTTAAGATTTAGCCTATGCTTT | | | | | |
| RAD_kmer_0000268_1_TGCAGGGTTAGGCTTCATCAATGGA | 143 | GGATTTGAAATTGCACACCAGCTTGGATTGCAAGGGTTAACC | G | G | A | G | GYSNP0069 |
| ATTGCAGCTTTGATCATATTCTTGGCCCCGGTATAATTGAT | | GTTGTTCTTACTTCAAGAGAGACTGCTGTAGGCGAAGA[A/G]T | | | | | |
| GGCTATAACTTTTTCAGCAAATTCA_NODE_1_length_471_Cov_ | | CAGCAAAAGTCCTACAAGAAGGAGGCTTAAAAGTGGTCTTCC | | | | | |
| 94.598724 | | ATCAACTCGACGTTATAGATCAACAATCGATTGATAC | | | | | |
| RAD_kmer_0000269_1_TGCAGGATACGATGCATAAAACTGA | 519 | TCGTTCTCAGCTCTCATTAGCTATGCATACAACAACAACACGT | G | T | G | G | GYSNP0070 |
| TCACCTCTAGAATAACCAGCTCTAGTCCTGCAAGAATTAT | | ACGTATACTGTTACGAGTCTGCTTTATAAGTAAATTT[G/T]TTA | | | | | |
| ATAAAGAGCAAAAGAGAAATGATATT_NODE_1_length_601_ | | TTCCTTGAAATCATAATATCATTTCTCTTTTGCTCTTTATATAA | | | | | |
| cov_100.224625 | | TTCTTGCAGGACTAGAGCTGGTTATTCTAGAGG | | | | | |
| RAD_kmer_0000271_1_TGCAGGTGGAATGGTGGCTTCAGAT | 396 | GTCGGCACCTAATATCAAGAATATTTGTCGCAGACCCTGCAC | K | G | G | T | GYSNP0071 |
| ATAATCTGCATGATCGTATCCACACTCTGCATCGGTTGAT | | AGGTTTAGTCATACAAAAATTTCACCTTCTATTGAGTG[G/T]T | | | | | |
| CAGGCTCTTCAAACTGGTTCATCATC_NODE_1_length_572_ | | ACTATGTGCTAATGATGTCGTACATTTTATCAGAGAATCACG | | | | | |
| cov_142.638107 | | ATGGACGAGATAAAGAAACACGAGTGGTTTCTAAAGA | | | | | |
| RAD_kmer_0000273_1_TGCAGGAGAGTTTTGACAAGATTAA | 327 | GTGCTGTCACTGTCAGTACTGTCGCTGTCAACATCTGACTCGA | G | K | T | K | GYSNP0072 |
| TAGGCAGCTAGAGAAGGTGACGAGGGTGACGGAATCTGA | | TATCTACTTCTTCTTGATCCTCAAAACTTTCAGGATT[T/G]TCT | | | | | |
| TAGGGCGCCAAATAATTATGTTAAGGC_NODE_1_length_548_ | | CTGCACTTATTAATCAAATCCTCATACTGCTTATTATTCTTCTT | | | | | |
| cov_139.049271 | | CAACTTCTGCCTCATCGCATTCAACGCCTTAGC | | | | | |
| RAD_kmer_0000282_1_TGCAGGCAGTGGATAACACAACCG | 157 | CTGGGTCGTGTTCAATGCGTTCAGTTATAATCTAAAAGTTTGA | T | — | A | A | GYSNP0073 |
| GATTTTCAAATTTTATGTAATTTTTTCCCTTCCAAAATCTC | | ATAAAGCGCTTTAGGAGATTGTATCCATTAAAAATAG[A/T]GT | | | | | |
| ATTTACCAAGACTCAAAACTTTGTTA_NODE_1_length_617_ | | TTAGATGAGTTTTAACCCATTTGACCCGTTTGAGTTAAAACAC | | | | | |
| cov_118.309563 | | AATCAAAATCGACCCACTATAAGTAAATCAGTCAA | | | | | |
| RAD_kmer_0000287_1_TGCAGGATACATGCAGTGGTTGTAA | 132 | GTCTATTTGTATTTAATTTTATACATTCTACTATTGTATGCGTG | T | C | C | Y | GYSNP0074 |
| AAATGGCTTCTAAAAGTTTACAAACAAATGCTCGCACATT | | TAACACTTTACTCAAATAAGTTGACTACCATATAAA[C/T]TTT | | | | | |
| CTACAATTAATCATGCTATTGTTTGA_NODE_2_length_585_ | | GAACTTAAACCCTTTCCTCTTTGATCATCCAAGTCAAAGTGCA | | | | | |
| cov_89.678635 | | TCCTTCTCTGTTGCAAATGGAGTATAATATATAT | | | | | |
| RAD_kmer_0000294_1_TGCAGGAGCCTATCAAAGCACAGGT | 284 | TGGCCTCCAAGATGATGGCGCACTAGACGCCGACACTTGCAG | G | S | G | S | GYSNP0075 |
| GCTCCTCATCAGCCTATTTCATCATTTCAGAATGCAGGGT | | GCTGTTTATAGCAGAATAGCCACTGGAAACAGCAGGAG[G/C] | | | | | |
| CTTATGCTGGTCCCGCCAGTTATACA_NODE_1_length_446_ | | AGCAGGCACCAAATTGGAAGCGCTGGTAGAAGCTACATTTTC | | | | | |
| cov_37.605381 | | CGTTCCGGGAGCACAAGTAACCTCCGTTTGACTATAAT | | | | | |
| RAD_kmer_0000297_1_TGCAGGACTAAGAATTTTGTTTATT | 342 | TAAGATCATTCTTCGGCTCTTTCCAGCAAAAAAAGAGTTGA | T | G | G | T | GYSNP0076 |
| CCATCAACAAGACCATGATTATCCTTTGGAGCTTTGCTG | | ATTTGCAATGATGCTATAACTTCACCTAAGGTGGAGA[G/T]T | | | | | |
| TCTTCTTGGACTTCTGCCCATTTATT_NODE_1_length_417_cov_ | | ATATCTACTTCTGGTGCAGGTAAAGCTTGTTATAATTTTTTTT | | | | | |
| 33.621101 | | TGTTTGTTATTGAAATAGGGATTTGGTACTTAAGGT | | | | | |
| RAD_kmer_0000297_1_TGCAGGACTAAGAATTTTGTTTATT | 84 | GCTTGCTACAGTTGCTTATGTTCAGCTAGTATTGGATTATAAT | A | A | C | A | GYSNP0077 |
| CCATCAACAAGACCATGATTATCCTTTGCAGCTTTTGCTG | | GTATTATCAAATTAAATGAATATCTTCATTTTCTATG[C/A]TTT | | | | | |
| TCTTCTTGGACTTCTGCCCATTTATT_NODE_3_length_191_cov_ | | AGGTCATAATACAAGTTCGAAGACCGGAGCTAATGTTAAAAT | | | | | |
| 283.151825 | | AAATGGGCAGAAGTCCAAGAAGACAGCAAAAGCTC | | | | | |
| RAD_kmer_0000299_1_TGCAGGTGTGGATTTTAAGGTGAAA | 372 | GGGTACACTTTGGTAAATAGTGTATCTTTAACAACGCCCAA | T | A | W | A | GYSNP0078 |
| TATGTCACCATTGATGGGAAGAAGTTGAAGCTTGCTATTT | | ACAAGATCATAACATGTAATACAACAAATAACTTATCT[T/A]T | | | | | |
| GGGATACTGGTAACTGTCTTTATTGC_NODE_1_length_442_ | | TAAAGCAATAAAGACAGTTACCAGTATCCCAAATAGCAAGCT | | | | | |
| cov_198.454758 | | TCAACTTCTTCCGATCAATGGTGACATATTTCACCTT | | | | | |
| RAD_kmer_0000300_1_TGCAGGATTTGAATCCATAGCTAGA | 102 | TTCCTTGAGATATGCGTTGAACAGCAGAAGACCAATGAGGAT | R | A | R | R | GYSNP0079 |
| GGTCTTACAAATGCAAAACTTAGAGTCGACTTCCGTCATC | | TCCACATGTAGGGTCCACCTACAGCTTGAAGGGCAACA[G/A] | | | | | |
| GTCTTCTATCTTTATGCTCAGATGTG_NODE_1_length_638_cov_ | | CACTTGTGTTCCCTCCATTGTTCAATGTTGTGGAGTTTGGCTT | | | | | |
| 125.835426 | | CACTGGGGTTGGAGATTTCAGTACAGGTGGGGCCAAG | | | | | |
| RAD_kmer_0000303_1_TGCAGGTGGCTTGGGTTTATTTGAG | 245 | CAGTGAACTGTTCGTGAACAGTTCAATGGAAAGTTCGTTTAT | A | T | A | A | GYSNP0080 |
| GTGGGTTTCATCAAAAAAACAAGCAAATCCCACCAGTGTT | | GTTTCTTCATTTAAGAAATAAACGAATATCATATGAGC[A/T]C | | | | | |
| GCAGTGGTTGGCAAATGGGTGTGTAA_NODE_1_length_642_ | | ATATTTTTCTTCATCTGATATATTAACAAGCATGAACATGGAT | | | | | |
| cov_47.507790 | | TTTTGCTGATTTAACTAAGGGGGTGTTTGTTTTTTG | | | | | |
| RAD_kmer_0000303_1_TGCAGGTGGCTTGGGTTTATTTGAG | 295 | ATTTAAGAAATAAACGAATATCATATGAGCACATATTTTTCTT | T | C | C | T | GYSNP0081 |
| GTGGGTTTCATCAAAAAAACAAGCAAATCCCACCAGTGTT | | CATCTGATATATTAACAAGCATGAACATGGATTTTTG[C/T]TG | | | | | |
| GCAGTGGTTGGCAAATGGGTGTGTAA_NODE_1_length_642_ | | ATTTAACTAAGGGGGTGTTTGTTTTTTGCCAGAAGAGCTTCCT | | | | | |
| cov_47.507790 | | GGCCTCTTATGTCTGCGCCGCGCAGACCATGCGCA | | | | | |
| RAD_kmer_0000313_1_TGCAGGAAATCATCAAACGTAGATG | 363 | TTTTTCTACCATAATGTTATATGAGATGAGTTGGGAATGTGAA | C | T | C | C | GYSNP0082 |
| ATAGGCATTCAATTCAAGGTACATAGAGGGATAAATAAG | | ATATGAAACTGATTTTCTGAGTATTGCGATTTGAAGT[C/T]GC | | | | | |
| TAATTTTAATTTCTATTGCAGCTGCTA_NODE_1_length_502_ | | GATTTGAAGTCGCCATATCATTTTAGTGATCAAATAAAATGA | | | | | |
| cov_107.324699 | | TTTTGTTAAGGGGTCAAATAGTCACTTTTTTAGCAG | | | | | |
| RAD_kmer_0000319_1_TGCAGGCGGTCATAGAGATGAAGA | 282 | TTTGGTAACAACTAGTAATGTTCATTTCAGAACTTCTTTGGTT | W | W | T | W | GYSNP0083 |
| GCTGAACCCGCAGCACATTGATCAAGTGGCGGTTCACACT | | AAAATCTTAGTTGATGATTTTCCCCTGTTTTTTTTTT[T/A]AAG | | | | | |
| CACTCGACTCATGGACATGCTCATGGA_NODE_1_length_450_ | | TCATTTGTGTTGTGATTGGGCAGCTGTTTTTTTATGCTAGAG | | | | | |
| cov_50.740002 | | CAATAGTCAAATGATTCTTCACAATTTAAGTGGA | | | | | |
| RAD_kmer_0000320_1_TGCAGGGTGTGCTGCATGATTTCTT | 235 | TTAAAGACCTTCATTGAGTATCAGGTTAAAGATGAACATATT | G | A | A | A | GYSNP0084 |
| CTCCCGTTTGGGTATTATATATTGATCTTCTTTGTATTAAG | | TACCGTTCAAGGGAAAGGCCCCAAGCAATAACCGTAAC[A/G] | | | | | |
| GGGCACTATCATAATTCGCTATTAA_NODE_1_length_607_cov_ | | TCCTCAGGAAGTCCCATAGGAAGTAACATTTCAGGTCTGAAC | | | | | |
| 144.090607 | | ATTCCAGAATTTCCTACCTCAACCCATTTCTTAAGGCC | | | | | |
| RAD_kmer_0000326_1_TGCAGGAAAGACAGCCTCACCAAA | 130 | TAGGCATTTAAAGATGGCCAACGTGGTACAAAGCTTCCTGGA | C | C | — | C | GYSNP0085 |
| GTTAGACTTTTGCCATTTTTTTTAACTTCATAGTTTATAGC | | GTGTTGAAAACACTAGTTGGAGTTGTGTATGCAGACAC[A/C]A | | | | | |
| TTACAAGTCTTTACCGGTTCAAGAGT_NODE_1_length_629_ | | GCACAAAGAAACTCCATAGCTGTAAGTTATCTGTTTAAGTGG | | | | | |
| cov_74.640701 | | TAAAATAGGTGTGGCTCGGACAACAGGTATGACAGGT | | | | | |
| RAD_kmer_0000328_1_TGCAGGCTCATTTGAACACATAGAT | 109 | AATTAAACCTATAAATTTCTATATTTGCTAGATACCTTTTGTA | — | C | Y | T | GYSNP0086 |
| TATGGTGCAAAATAAAACGGGTCAAAAGTAGCCAAACCT | | TTTTTTGTATCTAATATATGCTCATAGATTATTGTTTGTTTG[T/C]TCA | | | | | |
| ATCCTTAGCCATGTTTCCTAATGTTGC_NODE_4_length_242_ | | AAACATAGGCCCTACTTTGTGTTGACCATTGTTATGTGGAAG | | | | | |
| cov_11.285124 | | CACAAAAGAATGCATATGGAAGCGCAAAAGAATGC | | | | | |
| RAD_kmer_0000329_1_TGCAGGTGAAATCATACATGTATAT | 140 | AGTTAATGGTGTACTAATTATTTGTTTGCTAGACAATAGAAA | T | Y | Y | Y | GYSNP0087 |
| GCAAGGATTCCAAATCCCTGTCTTAACTTGACAATTAAGG | | CGATTGTACTCATTTCTTCAGCCATTATGTTTCACTGT[C/T]GG | | | | | |
| AGCCACTGCGTGAGGATTCTAATTTG_NODE_1_length_579_ | | GTGATGTCACTATGACTATATATATCTCATGGTTTGCCTATGC | | | | | |
| cov_95.576859 | | TATTATAATGTTTATATATAATTTATCCTTTTTAA | | | | | |
| RAD_kmer_0000334_1_TGCAGGTCTCTTACCATCAGAACTA | 548 | GCCGGTCAGCAACAAGAACAGGTTAAGAGTAGGGGTTCGAG | T | C | C | Y | GYSNP0088 |
| ACAAACCGTACAAAATCAAATTTGAGAGCATAAGGCAAC | | TCGGGGGGTTTGATCAATTTATAGATGCATACACCGACC[C/T] | | | | | |
| TCTCCAACGACCGTGTTAAAAACATCG_NODE_1_length_649_ | | GGAAACCCGCCAGGTTACTATGACAGGTTTCTGTGTCGATGT | | | | | |
| cov_119.767334 | | TTTTAACACGGTCGTTGGAGAGTTGCCTTATGCTCTCA | | | | | |
| RAD_kmer_0000336_1_TGCAGGCGCCTTGGGCTGAAAGAA | 456 | GATAAAGGTTGACATCGATGATTACATGGTTCGACAACTGGA | T | T | G | G | GYSNP0089 |
| AGCATTCAAGTAAAACTTTAGCAACTTAACGACTAATAAG | | CGGGAATAAAAATGAGTGGGGTTGGTGCAAGCAAAAAG[G/T] | | | | | |
| TAGTAAAATTATGACAAGTAGCAAGAA_NODE_1_length_559_ | | TATAGTTTTGAATTCTGGTATATAACTCGACTTTATGCTTCTT | | | | | |
| cov_168.334518 | | GCTACTTGTCATAATTTTACTACTTATTAGTCGTTAA | | | | | |
| RAD_kmer_0000339_1_TGCAGGTAATAAAAAAATCATTTAA | 158 | ATACACTTGCTCCACCGACCACATCCCGAGCTTCGATCAAGT | C | T | T | T | GYSNP0090 |
| CTTACTTTATACACACAAACATAACAATAGCAATGTTGCT | | TTCATGAAGGTTCATTTCAGTTCATGAATTTGGCATTT[T/C]CA | | | | | |
| TCACCTCATTTTACTTTCAGTTATAC_NODE_1_length_446_cov_ | | CTGATTTATATTGGAATTAAATATATTCATTTACTATTGTTGT | | | | | |
| 116.127800 | | ATTTTGAGTGAGCTTTCGGTATGCATAGTTTTTTC | | | | | |
| RAD_kmer_0000339_1_TGCAGGTAATAAAAAAATCATTTAA | 247 | TATATTGGAATTAAATATTCATTTACTATTGTTGTATTTG | G | T | K | G | GYSNP0091 |
| CTTACTTTATACACACAAACATAACAATAGCAATGTTGCT | | AGTGAGCTTTCGGTATGCATAGTTTTTTCTTCGTTTT[G/T]TAG | | | | | |
| TCACCTCATTTTACTTTCAGTTATAC_NODE_1_length_446_cov_ | | AAATGGGGCTCTAATATGCTTGATGCAGTTATATTCTAAATC | | | | | |
| 116_127800 | | ACTGGTAGTTGGAATACGTGTGTAGAGTTTACCTA | | | | | |
| RAD_kmer_0000340_1_TGCAGGGAATTAAACAACAAATTA | 259 | GATGATGATGATGATGAAGACTTTCTTAGGAAATGTTGCAGT | W | T | W | T | GYSNP0092 |
| AAAAAAACAAAAAACAAATAGAACAAAGCTTATTAATTT | | GATGATGATTTGTTTGTTGTCTTCGATCATAGTCTTAT[T/A]AA | | | | | |
| ATTGACAACAGTAACAATTGATTTATG_NODE_1_length_584_ | | TAATGTGAGTCAAGATCCTTATGTATGTTTCATGAGGATCAA | | | | | |
| cov_150.150681 | | GGAGTTGCTATGTAGTAGAATTTGTTGAAAAACATT | | | | | |
| RAD_kmer_0000348_1_TGCAGGGTTAGGCTTCATCTGGA | 206 | TAATGTATAAACTGTAGGTGGTGGTCTGCTGAAACAATAGCT | Y | Y | T | T | GYSNP0093 |
| ATTGCAGCTTTGATCATATTCTTGGCTCCGGTATAATTGAT | | GTGGTGACTGGTGCAAATCGAGGAATCGGATTTGAAAT[T/C] | | | | | |
| GGCTATAACTTTTTCAGCAAATTCA_NODE_1_length_402_cov_ | | GCACACCAGCTTGGATTGCAAGGGTTAACCGTTGTTCTTACTT | | | | | |
| 46.679104 | | CAAGAGAGACTGCTGTAGGTGAAGAATCAGCAAAGGT | | | | | |
| RAD_kmer_0000350_1_TGCAGGATGCACCTATAAAACCGAA | 210 | TTTCCTTATAATTTATTTTAAATATCAATACTTTATTATAAGTT | G | K | K | G | GYSNP0094 |
| ATTCATACACTAACAAGATTAAACATACCAAAAGCATTGG | | AATACAATGCAGTATCTGATTAGGTTAGGGTTAGTA[G/T]CTT | | | | | |
| CAGATCTTAGTTGGGCCAGTTTTTTT_NODE_2_length_445_cov_ | | TTAGAGAAGATTAATGTATACTCTTGTTAGTTTAAAGTTAAAT | | | | | |
| 53.757305 | | ATGTTATAAACCTCTTCATTGAATAATAATATTG | | | | | |
| RAD_kmer_0000363_1_TGCAGGAGGACTAACCATGTTAGAA | 376 | ACACCTTCGATTATTGTATTCTTCATAGATCTTCATCTAGTGT | — | C | Y | C | GYSNP0095 |
| CCTAAGTCATGTTATTCCATAAAGGCTTGTAAATAATTAA | | GGTTAGATCACGTGATTGTATCAATCACTCTTTTAGA[C/T]CA | | | | | |
| ATGCAAATTTATACACCAATTTCATT_NODE_1_length_585_ | | TTAAAAATGCTCGGTCTGCTTATATTTCATCATCCACTTAATA | | | | | |
| cov_74.617096 | | TGTGTCATTTGAGCTTAATATTAGCGTTTCAAATA | | | | | |
| RAD_kmer_0000363_1_TGCAGGAGGACTAACCATGTTAGAA | 482 | ATTTCATCATCCACTTAATATGTGTCATTTGAGCTTAATATTA | — | T | Y | T | GYSNP0096 |
| CCTAAGTCATGTTATTCCATAAAGGCTTGTAAATAATTAA | | GCGTTTCAAATATTCGATAATAGTACTAACATGGTAT[C/T]TA | | | | | |
| ATGCAAATTTATACACCAATTTCATT_NODE_1_length_585_ | | AAAGTTATTACTTATTACGCGTTTATCTGTAAAATGAATGAA | | | | | |
| cov_74.617096 | | ATTGGTGTATAAATTTGCATTTAATTATTTACAAGC | | | | | |
| RAD_kmer_0000366_1_TGCAGGTTGACCATATGCTTGAGTT | 354 | TAACTGATGCAATTTTGATCTGTTTGTTTGGTTTTAGCATCAT | A | W | A | W | GYSNP0097 |
| TGACTAGGTTGCTGTTGAGGGTATGCTTGATTCAGCTGCT | | ACTGTTGATCCGAGCCATGCACAAACACCATCTTATT[A/T]TG | | | | | |
| GCTGATAGCTGCCATAGTAACTTGAA_NODE_1_length_614_ | | CCCCACCTCTTGGCTCTGAACCAGCATCCTGGACCAGCTACA | | | | | |
| cov_166.032578 | | ATCATGCTCAGCAGACAGAAGCCGTGCCACCTGGCT | | | | | |
| RAD_kmer_0000368_1_TGCAGGAATGAAATGTGATGACTTG | 121 | TGAATGTTTGTCTTTTATGTATTTCGTAACTCATAGATTTATAT | A | A | W | W | GYSNP0098 |
| CTTCTTTTTGCCCATAAAACAAGCAAGTCTAGTATGATAG | | AGAGTAAATACAATGCAAGATAATTATGAAAGTCTA[T/A]AA | | | | | |
| TGTTCTGAAATAAAAGAAAGAATAAA_NODE_1_length_543_ | | ATTAATGTACAGGCTACAGATAAGCACAATAAATAGAGATA | | | | | |
| cov_126.263351 | | GTTAACTATTATTAATGTATCTCTAAGAAGATGATAA | | | | | |
| RAD_kmer_0000308_1_TGCAGGAATGAAATGTGATGACTTG | 228 | CACAATAAATAGAGATAGTTAACTATTATTAATGTATCTCTA | A | W | W | T | GYSNP0099 |
| CTTCTTTTTGCCCATAAAACAAGCAAGTCTAGTATGATAG | | AGAAGATGATAAGAACACGCATATATAATTATAAATAT[T/A] | | | | | |
| TGTTCTGAAATAAAAGAAAGAATAAA_NODE_1_length_543_ | | GCAGAATACACACACATTTTATATCCATTTATGTCATGATTAC | | | | | |
| cov_126.263351 | | CATGCTAGTTATGGAATTTGAATAACAGTAAACACTT | | | | | |
| RAD_kmer_0000371_1_TGCAGGAGCGTAAGCTGAGCGCCTT | 265 | ATGTAATTAACGTTATGATTTGCTGCATATGGAGTCTTGTTTA | W | W | T | T | GYSNP0100 |
| GATCGGGATTGTTGCTGAGGTGTTGGCTGAATAATGAAAA | | TCTAGAAGTCGGTTAGATCTTAAAGATCTATAAAATC[T/A]TA | | | | | |
| AATGTTCATAAGTATTTCATGTGTAG_NODE_1_length_660_ | | ATAAAATCATGAACAGCCCTGTAAATGGAAGAACTCTGCTAA | | | | | |
| cov_101.178787 | | ATCACATTAACTTTGTGCTTCAATGGTTTAATGAGA | | | | | |
| RAD_kmer_0000372_1_TGCAGGAAGATATATCTCTTGGATA | 152 | TATAGATGACTAACATTAGCTAAAAAAGAATGTAACATTAAC | W | W | W | T | GYSNP0101 |
| TTTGAGGTAAGTTTTTTATCCAGTTGTATAAACATATGATG | | AATAGAGGGCTTAACAATATTGATTAAAAATTCGAACA[T/A] | | | | | |
| CTCTATATTTGAACGAGATTTAGTT_NODE_1_length_588_cov_ | | AGAGATACTAATTTCCAAGGAAATAAAATTTACATAAAGTTA | | | | | |
| 139.896255 | | AAACAACTCAAGGGGCTGGAAGATGATGTTGGATCGTA | | | | | |
| RAD_kmer_0000375_1_TGCAGGCTTACACAATTACAGCATA | 413 | TGAATTTTTGAAGTTTGAACTACCAGAAGGGGAAAAACCTAG | K | T | T | K | GYSNP0102 |
| GTAACAATGAACTACTGATCGAATCTAAAACATGAAACTT | | GGTTTCTGCAACATTCACGTTAATCAGGTATTTGTTTC[T/G]TA | | | | | |
| GTAGTACAATATCTGGATTAAAAA_NODE_1_length_510_ | | ATTCTTTTGCTTTTCAATCCAGTTATTATGCACAATAACTTTC | | | | | |
| cov_46.274509 | | ATGTTCCAGATTCCATTAGATAATTCCGTTATCAT | | | | | |
| RAD_kmer_0000379_1_TGCAGGTGCAACACATTAGACAAAT | 177 | GCTTGCTCCTCATGGCCCAGTTTGTTACTGATTCGGATCGTGA | C | C | Y | Y | GYSNP0103 |
| CACAACGTATTTATCTTCACATAGGAAGGAAAACAAATA | | ACTAGTCGTTGCAAATGTATACCATTATATTAGCATC[C/T]AT | | | | | |
| GCAATCTTGCTTGCCGGAACAAATCCA_NODE_1_length_619_ | | TGTCAACTTTGTTGATAGCTCATAACCCTCTACCATAGAAACA | | | | | |
| cov_106.623589 | | CAACTGATGCTATCATATTCTTGGCCTTCATTATA | | | | | |
| RAD_kmer_0000385_1_TGCAGGTGATGGTCTTTTTACTATTG | 108 | GCCATATTTCGTGAGAAGTGTAAGAAGGATTAAAAACTGATA | T | T | G | K | GYSNP0104 |
| AAATGGAAAAAAAACATTACGAAAAGAAAACATTGCATA | | TGTAGACATCATGTTTTGGATTTAGGCATGATGTTTTA[G/T]GT | | | | | |
| AGATGATTGATCCTGATCTAAGAAAT_NODE_1_length_623_ | | TGTTTTGGCTAGAAAAATACCTAACACAACAATTTGAAACAC | | | | | |
| cov_87.775284 | | AATGTAATGGAGAAAATTATCATAAAATACGTTTGA | | | | | |
| RAD_kmer_000385_1_TGCAGGTGATGGTCTTTTTACTATTG | 209 | ACCTAACACAACAATTTGAAACACAATGTAATGGAGAAAATT | G | G | T | G | GYSNP0105 |
| AAATGGAAAAAAAACATTACGAAAAGAAAACATTGCATA | | ATGATAAAATACGTTTGATTGTTTGATGACCGATTTTA[T/G]T | | | | | |
| AGATGATTGATCCTGATCTAAGAAAT_NODE_1_length_623_ | | CTTGTTTCGCTACGGGAAATTTTGGTGTTGCCCTTGCAGGTGG | | | | | |
| cov_87.775284 | | AAAGGTTTTTTCCTTTAAGAGCATCACATAGACAAT | | | | | |
| RAD_kmer_0000386_1_TGCAGGTACCACACTTGCCTTTTGA | 331 | CACAATTTATGCGTACGAGAAAAAGTTAGAATAAAAGAAGA | G | R | R | G | GYSNP0106 |
| AGTCCTACAACCGTGATTATGTTTGTAGTTGGAAGGACAA | | AAAATTTGTAGAAATGCAGTTATTCGTCTGCATTTAACC[G/A] | | | | | |
| AATGCAGTGAATATGGCTTTCGTAAA_NODE_4_length_427_ | | AAGATATATGAATAAAATTAGTAAACAGAACAAGATATATTA | | | | | |
| cov_5.480093 | | GTTGTTATGATGCCTGGTTTAGAAACTACGGTTTTAAG | | | | | |
| RAD_kmer_0000394_1_TGCAGGAATTTAAAACTACCAGA | 200 | TAAGAAATGATTTCAACACTGTCATCACCATTACCCTGCAAT | T | A | T | T | GYSNP0107 |
| TTTAAACATTTATTTACAAATCATCAATTATCAACAAAAT | | AAAACACATATATAGCAAACATGTTAATATAAAATATA[T/A] | | | | | |
| TCCTAATTTAAAGGGGTGAAAACTTC_NODE_1_length_453_ | | AAAAAGGTAAAACATTAAAAAAAATGCAACCTTAGACGCA | | | | | |
| cov_55.388519 | | ACCTTAGAGGCTTGTACGACCATCTGTTTTTTCGAATCA | | | | | |
| RAD_kmer_0000394_1_TGCAGGAAAATTTAAAACTACCAGA | 275 | ATATATAAAAAAGGTAAAACATTAAAAAAAATGCAACCTTA | R | G | R | G | GYSNP0108 |
| TTTAAACATTTATTTACAAATCATCAATTATCAACAAAAT | | GACGCAACCTTAGAGGCTTGTACGACCATCTGTTTTTTC[G/A] | | | | | |
| TCCTAATTTAAAGGGGTGAAAACTTC_NODE_1_length_453_ | | AATCATTATGTTCTTCATCAACTGGAAGCTGTAAAATGTTAA | | | | | |
| cov_55.388519 | | ATGCACCGATTATACAATGAACTAAACATCACAGGAAA | | | | | |
| RAD_kmer_0000394_1_TGCAGGAAAATTTAAAACTACCAGA | 331 | GCTTGTACGACCATCTGTTTTTTCGAATCATTATGTTCTTCATC | R | G | R | — | GYSNP0109 |
| TTTAAACATTTATTTACAAATCATCAATTATCAACAAAAT | | AACTGGAAGCTGTAAAATGTTAAATGCACCGATTAT[A/G]CA | | | | | |
| TCCTAATTTAAAGGGGTGAAAACTTC_NODE_1_length_453_ | | ATGAACTAAACATCACAGGAAACTATCATATAATGATGCAAA | | | | | |
| cov_55.388519 | | TGTATAAAAAATACAAACCTTAGAAGCCTCAACCTT | | | | | |
| RAD_kmer_0000395_1_TGCAGGGTAGATTGCTTCTTAATAC | 203 | TTGATAATTTAGTGCTTATGCTCTGCCTTGTTTTCTGGGCATA | G | Y | G | Y | GYSNP0110 |
| AACTAATATTAAACAAAAACTTGTAAATATATTATTATTA | | TCATTTTGTGTTCATCCCATTTGGTTAGAATGATTTC[G/T]TG | | | | | |
| ACAAAACTAGAAGAACCTACTTTCAC_NODE_1_length_466_ | | TGTTGTGAACTAAATCTTTTACCATTTAGAACTAAGTAAATGT | | | | | |
| cov_151.302582 | | TTTACTGGTTCAGGTGATCAAACTGTCACGTTTAG | | | | | |
| RAD_kmer_0000398_1_TGCAGGCTTCGAGGAATGTCAACAG | 206 | TCATTTATGCGAATCTTGTATCAAAGATATCTTTCAATTTTGT | A | R | G | A | GYSNP0111 |
| CCATTGTACCCGCAGTGAAGAACCTGCAACTGATCGGAG | | TTTCTAAGATGTAGCAGGATATATGAGGTATTTTTGT[G/A]GT | | | | | |
| AAATAAAGGAAAAGACACCGGAAGAAC_NODE_1_length_557_ | | TGTTTGATGGATGAAGCTTTAATCGGGTAGTAGCAAACGGAT | | | | | |
| cov_76.549370 | | GTAGTTCGGTTCGCGTTTATTTGTAGCTAAATTATG | | | | | |
| RAD_kmer_0000399_1_TGCAGGCTACTATGAACCATTCACG | 125 | ATTCAAGAAACTAGCAAGTTGTGAAGGGTTAACGATGCCCGG | — | Y | Y | T | GYSNP0112 |
| CAGAAAATCAATGCCACATAAGCGACAAGGGAGAGATGA | | TATATGCACATCGCTACTCTTGAGGAGCTCAGACACCT[T/C]G | | | | | |
| AGAGTTTGACTTCTTGATGCCATCAAC_NODE_1_length_491_ | | CGGTACCTTTGATCTTCAGCATGAGCCTCAAGCATGCTCATAT | | | | | |
| cov_86.338089 | | TTTGCTCGGTTCTTGGCCCTTTTTGAGCAATGTCTT | | | | | |
| RAD_kmer_0000409_1_TGCAGGAAATGTTGAATGTGCCACC | 189 | TTGAATTTTTACTTATACTTTTTCGAGCAGTGTCCACAAGTTT | W | A | W | A | GYSNP0113 |
| TGTGTATATCGTTGGAGCTTTCATTCCAGCAACCATGATT | | ACGTCTTAGAAGCTGTTTCACAAGGAAAAAAAGTTAT[T/A]CT | | | | | |
| GCAGTGCTTTACTATTTTGATCATAG_NODE_1_length_563_ | | TTAAAAATCTTGGTTTAATTTGAAAACTAATATGCACCTGGTG | | | | | |
| cov_156.776199 | | TTTCAAAGTGGCTAAGCTCTTAGTGTGCATTGGAG | | | | | |
| RAD_kmer_0000410_1_TGCAGGAATGTTTTTCCTTTGATAG | 374 | ACAGCATTACATTCCATTATCTTTTTTTGGCTGGCCTGCAGAT | A | G | R | G | GYSNP0114 |
| GCAAGGGGTGTTTTTTTTTTTACTTCATTCCATCATGGGAT | | GGAACGTGTTTTAATTTAAATTTTTAGTATATTTATG[A/G]ATA | | | | | |
| GAAAGATACAGTATAACCCGTTCTC_NODE_1_length_581_cov_ | | GAGTGTATAGTTTTAACTCTACTTAATATTTCATTTTATAAAA | | | | | |
| 72.512909 | | TTTAATTATCTTTTATGTATAATAATTTAAATAC | | | | | |
| RAD_kmer_0000413_1_TGCAGGACTTATTTTGTATAGCAAC | 500 | TGGTGAAGCAATGTTGACAAATGAAAAATTTGGATCTAGTGA | C | C | C | A | GYSNP0115 |
| AGATCAACCTTTTCGGTTCCCTTCCTCCTTCGCTTTTCTAA | | GTATCCAATTCCTGGAAGGAGACACAACTGCACTCATA[C/A] | | | | | |
| TTAGAGCATTTTCCACTCTTGAAGG_NODE_1_length_651_cov_ | | ATACATCTACGCATATACATATGCCCACACGGACAAGTCTTT | | | | | |
| 100.402458 | | GCGTGCGTACACACATATATACATAAATACATAATTTC | | | | | |
| RAD_kmer_0000417_1_TGCAGGTCGGGCAAGGGGTTAGAT | 513 | AACACAATAAAAATTAGCCAAAAAAGAAACAAGTCAAACGA | M | A | A | M | GYSNP0116 |
| GGCCAATCAATGCAGGTTATTTTAATATGACCGAAACACT | | GTTGAAAGTAAAACAAAGTGTTTATGCATAAATCTCTTA[A/C] | | | | | |
| TTTTGTCCAAAACATTTCGTTTTTCTT_NODE_1_length_635_ | | AGCTTACATTTATAAGTTTTAGTATATGTTACTTGGCACCCTA | | | | | |
| cov_88.711807 | | GTTACTAGAAAGGAAAGAAAAACGAAATGTTTTGGAC | | | | | |
| RAD_kmer_0000420_1_TGCAGGGGTTTACAGAACAAGTGCA | 309 | CAGTTATGTGTATAAGCAAAATCACAAATACATACACACAAA | K | — | G | G | GYSNP0117 |
| GGTGCTCCCCAGCTTGTTAGAGTTCCATCCGGGTATCAAA | | CCAATACTAGAATACATTTATAAAAAAGGCCCTATTCG[G/T]C | | | | | |
| ACCAGCCTCAACATGTCAAGTACTCC_NODE_1_length_374_ | | ATTTTCAGCAAAAACATTTCAAGAAACTCATCTGTCATGGCT | | | | | |
| cov_48.855614 | | GTGCTGTGCAGTTCTCACCTGTTGACCTCTTGTTCTT | | | | | |
| RAD_kmer_0000429_1_TGCAGGTGTTCAGCGTAAAAACITA | 106 | GCATGAAATATTGTGAAAACTGGATTAACAAGGATCAAGTTC | A | A | W | T | GYSNP0118 |
| TATGGTTACCGTTGCTAATTGCTTTACCAACAGATTAGTCC | | TTTGTCTTAAACAAGCCAACTACATTTTTAAAATAACT[A/T]G | | | | | |
| TTATAAAGTAGTAGAGGAGAAGGGT_NODE_1_length_441_ | | ATAAATTTCTGACCGGACCACAGGCAAAATATTGGGACAACT | | | | | |
| cov_41.834469 | | GGATTACACAATGAATAACTTCTGTTGGAACTTGACT | | | | | |
| RAD_kmer_0000435_1_TGCAGGTACTCAACCTGATGATGTT | 119 | TCATGTAAATCTTGAAATTTAACCACTGTTTGTTGCATGAACA | A | C | C | M | GYSNP0119 |
| CTTGTTTTGGCAAAGAAAGGCGTTCCAAAATTGAATAGAC | | TCTTATAACACATTCAAGCAACACAAATACGTATGAA[C/A]A | | | | | |
| CATCCATTCGTGGCGATCATTTGTTC_NODE_3_length_374_ | | ACTCTCAAATTAATCCAAAACAGAATAGAGCTTTTGAGGGAA | | | | | |
| cov_15.946524 | | AATGGAAATGATGATTATAAACATTAACCTAAAAGTT | | | | | |
| RAD_kmer_0000442_1_TGCAGGTACTGTTAGTCACCCATAT | 478 | TGAAAGTGATTATATGGCAATCATCCGATAACAAAGTGTTCG | A | R | A | G | GYSNP0120 |
| ACCGGATTAGTAATTAGTATACAAAATTAGCCTATTTTAA | | AAGAATTCTGATAACTAGACCAAAAGTTGATTATTTGT[A/G]T | | | | | |
| TCATTGTTCACATCAGCAAGATGTTA_NODE_1_length_605_ | | AATCAGTTTTGGATATATGACTCTCTGTGAAACTAATTACATG | | | | | |
| cov_128.910751 | | ACCATACATAAAATAATATAACATCTTGCTGATGTG | | | | | |
| RAD_kmer_0000445_1_TGCAGGTAAACCGAAAAGCATCCG | 487 | AAATTAACCGCTAGAAACTCGTTATCATTGATCCAAAAGCTC | G | G | R | R | GYSNP0121 |
| GATATCAGGCATACCTGCATTAATCCTCGGATCCTCGCCC | | GAAACCGTTAGGTCCTCAATCGGTGTTAATATCGGTTC[A/G]A | | | | | |
| GCACATGAGATTCTCGCTACGGGTAAC_NODE_1_length_596_ | | ATTCAAAATTAAGGTCTAGAAGTTTGGCAAACTCACGCAGAC | | | | | |
| cov_148.201340 | | GGTTACCCGTAGCGAGAATCTCATGTGCGGGCGAGGA | | | | | |
| RAD_kmer_0000454_1_TGCAGGTTTAGGTGAATCAGGGAAT | 468 | AAAAAAAAAAAAACAATTAGCTGACCTTCCAAACCGGTGTG | A | G | A | A | GYSNP0122 |
| CATGTTTTCTAGTTTTGTACCTTTAAGAGGCATGAAATCA | | AAATGCACCGAGGCCCGTCCAAGATATACAACTGTTGAT[A/G] | | | | | |
| AAAATTGTTCCTTACTATATGAACGG_NODE_2_length_635_ | | GTAGAAATGTCATACACGTTAAGGTAAACAGGGGCGGTTCC | | | | | |
| cov_79.107086 | | AGGAGGGTAAAAACGCGAAGAGTCATCTCTTGGCAATAT | | | | | |
| RAD_kmer_0000456_1_TGCAGGCCCTTGCTTCAGCTCTGCC | 281 | TATCATATAAATCAGGAGGAGCCTTGGCCCTTGGGTGGCAAA | G | G | A | G | GYSNP0123 |
| ACAGTATCTGGCTGACCCCAAAAGATTGGTTTCAGTCAAC | | AACAGAACCGCCTTGAACTCAACTTCACCTTCAGCATT[A/G]C | | | | | |
| TTCAACATGGATTTGCTGAATGATTC_NODE_1_length_639_ | | AAATGACTCCATGCCAGTGGCTTCTCATCACCAAAATCCTGTT | | | | | |
| cov_90.643196 | | AAACAAAAACAAATTAGAACATATTGTGACGAACCA | | | | | |
| RAD_kmer_0000465_1_TGCAGGTCGTTCAACTGTGAAAAGT | 206 | AAGAAAACGAGCCAGTGGTGGTCAAGGCTGCTTTGAATGATG | R | G | A | R | GYSNP0124 |
| CTTGAACCATCTTCTGAAGAGAATGTAATGTTGCCGCCTT | | TAGAAAATGTTTCTGTAGCTGGTTTGGAGGGAGATGCG[A/G]C | | | | | |
| CTGAACTGCCATCAGCCGCTGCTTTC_NODE_1_length_635_ | | TCAGTCAACAGAAGTTTTGACCAAAGCTATGCCTGAGGATGC | | | | | |
| cov_160.713379 | | AGATTATGGTCTTGAAAACGGGGCGGCTGACAAGTTC | | | | | |
| RAD_kmer_0000466_1_TGCAGGACACACCACCGGGGCAGG | 395 | ACCAAATATATGTCGTTCAAAAGTCAAGTGAGTGGTGTCTAC | C | A | C | C | GYSNP0125 |
| GTGAAGGACAGCCGCACCTCTCATCACATATAACACCGCT | | TCTAACGCCACGAAATGTCCAAATGTCAACCTCTCCAT[C/A]A | | | | | |
| TCCTCTCATGTCCGCCATCCTTAATGA_NODE_1_length_544_ | | CCACAACCTTCCACGATGCTCCCTCTGCCAATCTATATATAGT | | | | | |
| cov_87.156250 | | ATTTATATCGGAGATAATAATAAAAAAAGTATAACA | | | | | |
| RAD_kmer_0000469_1_TGCAGGAACCATTTTCTATGGATTT | 215 | CATTCGTACGAATGGCAGTAAATATATATAACACAGACACGA | A | G | G | A | GYSNP0126 |
| GTAGAAATTTGTCTTAGATTTGGGTTTTTATAGGAAATTCT | | TTCGTACGAATGGGATCATACTTATATCCCATTCGTAC[G/A]A | | | | | |
| TCGCAATTATATTGGAATTTGCACA_NODE_1_length_677.cov_ | | ATGGCTATGGCCATCCATACGAACTTTACAAACTCGTCGTTA | | | | | |
| 71.431313 | | ACACGTAAAACGACATAGAAACAACGTTCTATAACCA | | | | | |
| RAD_kmer_0000470_1_TGCAGGATCTTGAGAAAGAGAGGA | 83 | GCAGCAAAAAAAAAAAAAAAAAAAGCCAAATTAACAAGAAT | A | G | G | G | GYSNP0127 |
| AAGAGAAAGCCCAAATCGTGTATGAACGAAAGAAACAGC | | GTATTGCCAAAATAATAAGTAATAACCCGTTTTCGATCC[G/A] | | | | | |
| TTAACAAACTACGAGCCAAAGCTGAGAA_NODE_1_length_ | | ATCAAAAACAAATTTTCTAACAAGAAAGTAACTTTTAAACCT | | | | | |
| 248_cov_40.653225 | | TTAGTAGGTAACGGGCGCAAGGATTTCAAGTTGGGTTC | | | | | |
| RAD_kmer_0000471_1_TGCAGGCGCTTCGTGGCAAAGAAG | 110 | TGTCAACCCCAGAATACTCGTGTTGTTCGGGTTAACGTGTCTA | A | T | A | A | GYSNP0128 |
| ATGTATCGGGTTCGTTTCTACAACTCTTTCTATTTGTTATC | | ACACAATTTTCAAGTCGGGTTAAAACCTGTCAACCCA[A/T]AC | | | | | |
| CCTTCACCGCTTAGGGGTGCTACATG_NODE_3_length_183_ | | ACGACCCATGTAGCACCCCTAAGCGGTGAAGGGATAACAAA | | | | | |
| cov_206.874313 | | TAGAAAGAGTTGTAGAAACGAACCCGATACATGTTCT | | | | | |
| RAD_kmer_0000474_1_TGCAGGTGGTGCAACTAATGATAGG | 117 | ACAACCCAAAAGAAGTTGAGGCATGACCTATTAGTCTAGTGG | C | Y | C | T | GYSNP0129 |
| CAGACGAATGCGGCTTGTGGTTCTAGCAGCAGCAGAGGTT | | TATGGTGTCCCCCCCTTACAAATATGAGGTTGTGGGTT[C/T]A | | | | | |
| CTGCTGCTCGCGGCTCAGACTCACTG_NODE_2_length_176_ | | AATCCTTGCAAATGCAAGGTAAAAATGGAATTATGGGTGTTA | | | | | |
| cov_9.312509 | | AAAAAAGTTGGCCGTTAAAAAAAAAAAAAAAAAAAAA | | | | | |
| RAD_kmer_0000476_1_TGCAGGTTACTTCAGGAATGAGCCC | 239 | ACAATAGTGACACAATGATCATTTAAAAAGAAAACTAAAAA | T | C | T | — | GYSNP0130 |
| TGGTTTTAATCTTTATGGATGCACCTTAATAGGTATGTTAA | | AAATTGGATGAAATGTGCTTCGAGCCAAACCGTGGCTCT[T/C] | | | | | |
| AGAATAGTTAAAAACAAAATACAGA_NODE_1_length_568_ | | ACTAATAAGCCATAATCTGATAATACTATCTAATACAAACCA | | | | | |
| cov_107.915489 | | CCCGACCCGTTTTTTGCCACATGTACACACCACACATA | | | | | |
| RAD_kmer_0000476_1_TGCAGGTTACTTCAGGAATGAGCCC | 331 | ATAATCTGATAATACTATCTAATACAAACCACCCGACCCGTT | W | T | T | — | GYSNP0131 |
| TGGTTTTAATCTTTATGGATGCACCTTAATAGGTATGTTAA | | TTTTGCCACATGTACACACCACACATAATCATAAGACT[T/A]A | | | | | |
| AGAATAGTTAAAAACAAAATACAGA_NODE_1_length_568_ | | CATTTGGTGAATTACGACGAGTGGTGGCAGTCACCAAAGTAA | | | | | |
| cov_107.915489 | | TACCCCCTGTATTATCATAGACTGGTGGTTTCCACTC | | | | | |
| RAD_kmer_0000476_1_TGCAGGTTACTTCAGGAATGAGCCC | 473 | AGACTGGTGGTTTCCACTCTGCAAGAACTGCGTAATGCAAGA | M | C | C | — | GYSNP0132 |
| TGGTTTTAATCTTTATGGATGCACCTTAATAGGTATGTTAA | | AAAAAGTAATATAATTACACTATCCAAATCTGTGAAAA[C/A] | | | | | |
| AGAATAGTTAAAAACAAAATACAGA_NODE_1_length_568_ | | AATTATAAATTGTGTAACTTATCTTATGGCTCTGTATTTTGTTT | | | | | |
| cov_107.915489 | | TTAACTATTCTTTAACATACCTATTAAGGTGCATCC | | | | | |
| RAD_kmer_0000482_1_TGCAGGAGGCGCTGAGAATGAAGT | 353 | ATTTTCTATCATAAATTTGTTCATTCGGAAGCCAAAAGTTGGT | G | G | T | T | GYSNP0133 |
| GTTTGGATGTTGGGTCTCGGGCAAATGACACCGGAAAAG | | ATCAAAGGACTTTTGGATAACCAATATCTAAGAGAGA[T/G]A | | | | | |
| GGCCAGGTGACCGGAAATTTATAATGCC_NODE_1_length_ | | GAAGAAGAGAAAGCTCCAAGAAAAACTTAACGACAGTTTTG | | | | | |
| 480_cov_88.708336 | | ACCTCTGGTCACACACGCGAGGCATTATAAATTTCCGG | | | | | |
| RAD_kmer_0000483_1_TGCAGGAACCAGTTCAGGGTCCTAC | 127 | CGGCTGAGGCGCACGCCTCGAGGCGAGGAGGCTAGAAAATG | A | G | R | G | GYSNP0134 |
| CCGATAGTAGGAAGAACCGCGCGTTTGTAGATCATCCTTT | | AGTCTGAGGCGGCGCCTCATCGGGTATTTTTGTACGTGC[G/A] | | | | | |
| GATCAATGTAAAGAATATCTTCTTGT_NODE_6_length_302_ | | CCTCGTAGGGATGAAGCGCTAAGAAAAGTTGCGCCTCAGGG | | | | | |
| cov_39.821194 | | GGTTTTGATGTGTGTTCTTGATGTTATAAACTTTTTGTG | | | | | |
| RAD_kmer_0000483_1_TGCAGGAACCAGTTCAGGGTCCTAC | 225 | GCTAAGAAAAGTTGCGCCTCAGGGGGTTTTGATGTGTGTTCT | G | A | G | G | GYSNP0135 |
| CCGATAGTAGGAAGAACCGCGCGTTTGTAGATCATCCTTT | | TGATGTTATAAACTTTTTGTGTCAATTTCAAACATTCC[G/A]TG | | | | | |
| GATCAATGTAAAGAATATCTTCTTGT_NODE_6_length_302_ | | TCTTTTTGATGAACCTGGTGACGAAAATAGTTGGTATTTTATT | | | | | |
| cov_39.821194 | | TATTATAAGATATATAATTTTATATTTATTTTTTA | | | | | |
| RAD_kmer_0000486_1_TGCAGGGGACTTAATGTTGACATCT | 81 | ATGCTATATATTATATGATAGTATTTTCTGGGCCCTCAGTTTA | T | T | Y | C | GYSNP0136 |
| CGGATCAGAAATACTGATTCAAAGCCATTTCTGTTTACGT | | AGGAAGGAACATGCAAGGGATTCAATTTTGGAACATA[T/C]T | | | | | |
| TTGCATATCACACCTATTTTTCTGTT_NODE_1_length_643_cov_ | | TGAAATAGGGGAAATTTTGAAAACACAATGCAAGTTTACCAA | | | | | |
| 148.662521 | | TATTTTTAAATATAGTTTACTGAATCAAAGGGGGGAT | | | | | |
| RAD_kmer_0000486_1_TGCAGGGGACTTAATGTTGACATCT | 250 | ATGCAGAGCAAAATAAAAGTGTGAAGGGTTACAATAAGCCA | G | G | R | A | GYSNP0137 |
| CGGATCAGAAATACTGATTCAAAGCCATTTCTGTTTACGT | | CAGAAACATAGAAATAAGTCTTTGGCAGATCTGATTAAC[G/A] | | | | | |
| TTGCATATCACACCTATTTTTCTGTT_NODE_1_length_643_cov_ | | GTGACTGAAATAAAGAAGCTACCATCAACAGGTCATTGCAA | | | | | |
| 148.662521 | | ATAAAATAGTCCAGAACAACGATATATCATAATAACAGC | | | | | |
| RAD_kmer_0000486_1_TGCAGGGGACTTAATGTTGACATCT | 355 | TCAACAGGTCATTGCAAATAAAATAGTCCAGAACAACGATAT | T | T | Y | C | GYSNP0138 |
| CGGATCAGAAATACTGATTCAAAGCCATTTCTGTTTACGT | | ATCATAATAACAGCATGAGCTTCTATATCTTATTTACA[T/C]G | | | | | |
| TTGCATATCACACCTATTTTTCTGTT_NODE_1_length_643_cov_ | | TTTGATGGCATTTTGTATCTATATGGTACTGACCAAGTAGTGC | | | | | |
| 148.662521 | | TTTGCATTACAATAAGAAAACACAAATTCTTATGTT | | | | | |
| RAD_kmer_0000486_1_TGCAGGGGACTTAATGTTGACATCT | 453 | ATCTATATGGTACTGACCAAGTAGTGCTTTGCATTACAATAA | G | G | K | T | GYSNP0139 |
| CGGATCAGAAATACTGATTCAAAGCCATTTCTGTTTACGT | | GAAAACACAAATTCTTATGTTGCTGGCAAGTACAAAAT[T/G]G | | | | | |
| TTGCATATCACACCTATTTTTCTGTT_NODE_1_length_643_cov_ | | CAACACAAAATGAATAGTTAATAAATCCTACTAAGTATGATA | | | | | |
| 148.662521 | | CTTAGCAGTTAGCCCCAAATAAACTAAAAACTATCCT | | | | | |
| RAD_kmer_0000490_1_TGCAGGTATTTCTTTCGATGTTTCCT | 230 | GGATATAAATATTGCTTTTCACAACCTGCCTATTATTAAAAGG | T | C | T | — | GYSNP0140 |
| GCATCCTAACCCTCTGCCAATCTGCAAATTTGCTTTCTTGT | | TACCAACAGGTTTTTTATCATTGATTTACAATTAT[T/C]GTT | | | | | |
| CTCAGAAGTGTCCATCTTCCTTTC_NODE_1_length_617_cov_ | | CAGTTTTGTGAAGATTTTAAGTTATTTTTGTTTGTTGGTGTTTC | | | | | |
| 91.534843 | | AGATTGAGAGAACTGAGCACAGCTGAGATTGGT | | | | | |
| RAD_kmer_0000503_1_TGCAGGTTAAAAATTAAGCATCCGG | 115 | CTACCTGCTAATCCACCCTTAAAAGATGCACTTGCATCTAATC | C | C | T | Y | GYSNP0141 |
| TTACCAAAAAAATATCGATAAAAACATAGGTTTCAGTGTC | | GTAATGGACCTACTTCTTTTAACATTGAGAACTCTCA[T/C]AT | | | | | |
| TTATCATTATAGCCTACAAATTGTAG_NODE_1_length_585_ | | AAGTCCTCAGATGGGTCCATCATGGTTTGATCAATACGGAAA | | | | | |
| cov_100.923080 | | GTTGAAAACTGGTCAAATGTCTTTACAAAGGGTGGA | | | | | |
| RAD_kmer_0000504_1_TGCAGGTGGTACAGAGTACAAGGA | 488 | GGTTACGTCCATTCTGGTAGGGGCCAGCTCTGCCACCACTGC | C | Y | Y | — | GYSNP0142 |
| ACAGTATGTACCTAGAAGATCCTACAACCAAAGAGGCAA | | GACCACCACGCCCATTCCCGTAACCTCTACCACCACCA[C/T]G | | | | | |
| TGGCCGTAGCAGCGGTGGTGGTGGTCGT_NODE_1_length_551_ | | ACCACCACCACCGCTGCTACGGCCATTGCCTCTTTGGTTGTAG | | | | | |
| cov_82.088928 | | GATCTTCTAGGTACATACTGTTCCTTGTACTCTGTA | | | | | |
| RAD_kmer_0000506_1_TGCAGGATCCGAAAGCTTTATTAAA | 449 | ACGAACCCTTACCCACATATATATAAGTTATATTGTTTTGCGG | T | A | T | — | GYSNP0143 |
| TCAAATTTAGTTTGACTTTTCATTATTCCCAAAGAAAGTCA | | TTCTTAAATCTGATTCAACCGGGTTGACCATTGAACT[T/A]GT | | | | | |
| GGCTAGTGTTTTCACGTTAAACCGA_NODE_1_length_535_cov_ | | AAAAAGAGCGGTTCAACGTTCGGTTTAACGTGAAAACACTAG | | | | | |
| 78.575699 | | CCTGACTTTCTTTGGGAATAATGAAAAGTCAAACTA | | | | | |
| RAD_kmer_0000517_1_TGCAGGAAGCAAAAATGGAGATAG | 341 | ACTCTAAAGTATGTATACTTGCTTATACTTTTCGCTCACCATA | C | Y | T | Y | GYSNP0144 |
| TAACAACAAAACATATCCATGAAATTAAAATGATAGTTTA | | TGCGAAATTTCATTTTCATCATATATTCCATGATTAG[T/C]TGG | | | | | |
| ATCATTCTTTTATTATGAGTAATAATA_NODE_1_length_657_ | | CACATATGCCTTTTTTTTGTTGCTCAGACTAACATGCTCGATA | | | | | |
| cov_108.126335 | | TTTCAGGTATAATGTTGCGATTAAGTGTGCCACC | | | | | |
| RAD_kmer_0000517_1_TGCAGGAAGCAAAAATGGAGATAG | 391 | TTTCATTTTCATCATATATTCCATGATTAGTTGGCACATATGC | T | T | C | T | GYSNP0145 |
| TAACAACAAAACATATCCATGAAATTAAAATGATAGTTTA | | CTTTTTTTTGTTGCTCAGACTAACATGCTCGATATTT[C/T]AGG | | | | | |
| ATCATTCTTTTATTATGAGTAATAATA_NODE_1_length_657_ | | TATAATGTTGCGATTAAGTGTGCCACCATTACTCCAGGTATAT | | | | | |
| cov_108.126335 | | TCAAGTTAATAAACCTATATTGGAAATCTAGCAC | | | | | |
| RAD_kmer_0000519_1_TGCAGGACCGCTGCCGACGACACA | 327 | GTCCAGTTAAATCTCCCATTCGGTCCGGTCCCGTTACATTAAT | A | R | A | R | GYSNP0146 |
| AACGCGCAACGTTCGGACGGTTGCAGACGAAAACGTTCG | | TAATTAACCGTTAATCCTTACAATAAACAAACAGTAA[A/G]CA | | | | | |
| AGCAAACATTGCTCTGAATATAGCCATT_NODE_1_length_470_ | | TCAGTGGCGGTTTAGAGCTATCTTCCCCTCTGCAAAACCCTAA | | | | | |
| cov_135.408508 | | ATCGAGTGTAAGTATCCTTCATCACCGATCATCAA | | | | | |
| RAD_kmer_0000520_1_TGCAGGGGTCAAACTTCCAAAAAA | 99 | TATCCACGTTGATTCTGGTGGTATCCATGTGTCTGAGGGTTTG | G | A | R | R | GYSNP0147 |
| GGTTGGTAGTATGCCTTACAAAATATACAAAAGCTGTGTT | | ACCTACTGTAATGGGTATTTGAACCATAAGGTTGACC[G/A]TG | | | | | |
| GATCTGGCGTTGACTTTGTGTTGACTT_NODE_1_length_627_ | | ACCCGGGTCATAGCTATGTGGAGGATAACCTGAACTAGGCTG | | | | | |
| cov_101.625198 | | GACCATCCTACTTGAGTCCTGACTGTAGTAGGGTCT | | | | | |
| RAD_kmer_0000528_1_TGCAGGCCCGCGGATCACAACCACA | 157 | ATCGCTCCCCACTTGTTGGAAGCCATCACCAATTCTCAAATCT | A | G | A | A | GYSNP0148 |
| CGAACATCATCAGAACCTATGTTCAACAATGAAATGACTT | | TCCTCGTCGTCTTCTCGTCCCGCTACGCTGATTCCAG[A/G]TGG | | | | | |
| CATGCACCCGAGATTCTATCCCAACA_NODE_1_length_619_ | | TGCCTTGATGAACTTTCCCATATGACCCATTGCATGTGTCACA | | | | | |
| cov_157.993546 | | CCAATTATCAACAGACCCTTCTTCCTGTTTTTTT | | | | | |
| RAD_kmer_0000529_1_TGCAGGTATATATTCTGTATAAAAA | 233 | TGCAAATATGTATACTTCTCAGACTAATCTGAATGATGCAAC | A | A | A | G | GYSNP0149 |
| GTCAACACTTTGAATTTTGGCTTTTTAAGTTTTGTTGACCC | | AGCCTGAAATGAACAAGAAAATAACAAAAAGTTAATTA[A/G] | | | | | |
| AGTTCACTATGTTTTACTGGTTTTC_NODE_1_length_576_cov_ | | GTTCAAACATTTGATAAGATCTATATGTACATTGCTTGGATAA | | | | | |
| 84.118057 | | CGGGCAAAACCGGGTTAACAAGTCATATTTTAGCGGC | | | | | |
| RAD_kmer_0000534_1_TGCAGGTTTCCGACAAAAAAGC | 317 | TGGAAAATTTCAAGAATGAAAGTCATTAGTAGGGAATCAAGC | C | T | C | T | GYSNP0150 |
| GGCAGATTCTCCGACAAAATTCCGACTAGTTTCTAGCTAC | | TAGTAAAAGAATCAAGAAGCTAAGGACTAATAATGGTC[C/T] | | | | | |
| ATTTTTTAGTGCTAGTTTTATTCCGTA_NODE_1_length_549_ | | AGAGTTATGTAGTGGTGAGTTTAACCATTTTTTTTAAACAAAA | | | | | |
| cov_80.373405 | | TGACATAACTAGATATGGTCGGAAAGAAAATAGAAAT | | | | | |
| RAD_kmer_0000536_1_TGCAGGATCACTTTCACTACATCAA | 439 | CCTCCATTGATCTGGCATTTTCCCAGATTTCAAATTTTGCTAT | G | T | G | T | GYSNP0151 |
| TCACACCATTGTTTTGTAGGTAGTAGGAGCAATGCCGAAT | | AAGATACTTAATAAGTTTCAGTTATGACATAAAAACC[G/T]TT | | | | | |
| ACAGGCAAACCAAACTCCACCAATGC_NODE_1_length_600_ | | ATATTTTTTTGCAATAACATACTTTTTAGAAGGTTAGAAATAA | | | | | |
| cov_147.115005 | | CGAGATGTAACTGATATGTTGCAACGATAGCGGAT | | | | | |
| RAD_kmer_0000537_1_TGCAGGTTCAAAGTCTTTGTGATAC | 91 | AACCCTCAATGCAAATAATTGTTGTGTTAAATATTATACCAAT | Y | T | Y | T | GYSNP0152 |
| ATTGCTCTTACCGGAACAAGAAATTGATCGGCGACCTGCT | | GATCTATGCTTTTTACAGTTGTGAACAACCCAGGCAG[C/T]CC | | | | | |
| TTTAATTGATATAGTATAGTTGTGAT_NODE_1_length_480_ | | ATTATTCCCAGACAAACTCAAATTCGCTAACCCTTTCAAAAC | | | | | |
| cov_150.695831 | | AATCAAAGTACTAACCTTTATCTCACCGCTCAACTG | | | | | |
| RAD_kmer_0000537_1_TGCAGGTTCAAAGTCTTTGTGATAC | 146 | TTACAGTTGTGAACAACCCAGGCAGCCCATTATTCCCAGACA | Y | C | Y | C | GYSNP0153 |
| ATTGCTCTTACCGGAACAAGAAATTGATCGGCGACCTGCT | | AACTCAAATTCGCTAACCCTTTCAAAACAATCAAAGTA[C/T]T | | | | | |
| TTTAATTGATATAGTATAGTTGTGAT_NODE_1_length_480_ | | AACCTTTATCTCACCGCTCAACTGTAGCAAATAAGGACACAC | | | | | |
| cov_150.695831 | | TTCTTAGTTCTTACAAAATGGTTGTTTTAGTTCGCAT | | | | | |
| RAD_kmer_0000546_1_TGCAGGTTTCATGACATAACAGAAT | 525 | AGTTGGTCAAGCACCTTCATTTCGTCATAAAGAACCTTCGTTT | A | A | M | M | GYSNP0154 |
| TTGATGATGCCAAAAGGAGTTGTCGTATGCGCTTGGCTGG | | TCCTTGAACTATCAAGAACTTTGTCCATAAGTTGTAG[A/C]GG | | | | | |
| CCATAATGAACGCAGGCGTAAAAGCT_NODE_1_length_592_ | | AGCTTTTACGCCTGCGTTCATTATGGCCAGCCAAGCGCATAC | | | | | |
| cov_167.719589 | | GACAACTCCTTTTGGCATCATCAAATTCTGTTATGT | | | | | |
| RAD_kmer_0000552_1_TGCAGGATACAATGAACCATTCCAA | 174 | AAGGTGCCAAAACATGCCTTAAATGGTTCCAATATGCTTCTT | G | A | A | A | GYSNP0155 |
| TTTGAACCTGCACTTGTAAGATTCACAGAATTATCAATAG | | ATGGGATTTCCCGATTTCGGGAGCTCTTTTTTTCTGCT[A/G]AT | | | | | |
| TAGAACTTATTGGACCCAGACCGTGA_NODE_1_length_574_ | | TCAACTTGAAGACGACTTTAGACCTCTTTTTAAGTTGCTAGAA | | | | | |
| cov_86.318817 | | ACTCAGCCAGATCCATCAGGAAAAGCCGAATCATC | | | | | |
| RAD_kmer_0000552_1_TGCAGGATACAATGAACCATTCCAA | 301 | CTCAGCCAGATCCATCAGGAAAAGCCGAATCATCTGTTACCC | R | G | G | — | GYSNP0156 |
| TTTGAACCTGCACTTGTAAGATTCACAGAATTATCAATAG | | GCATTAAAGTTGTTGACATAAATCAAATGCATTTGCTT[G/A]A | | | | | |
| TAGAACTTATTGGACCCAGACCGTGA_NODE_1_length_574_ | | AGGCGAACTCAATTTGAGCCTTCTTGATTATAATGCCCTTACA | | | | | |
| cov_86.318817 | | TCCTCTGAAAATGATCTGGGCCCTAGTCAGGCTTCT | | | | | |
| RAD_kmer_0000552_1_TGCAGGATACAATGAACCATTCCAA | 362 | AAATCAAATGCATTTGCTTGAAGGCGAACTCAATTTGAGCCT | C | T | T | — | GYSNP0157 |
| TTTGAACCTGCACTTGTAAGATTCACAGAATTATCAATAG | | TCTTGATTATAATGCCCTTACATCCTCTGAAAATGATC[T/C]G | | | | | |
| TAGAACTTATTGGACCCAGACCGTGA_NODE_1_length_574_ | | GGCCCTAGTCAGGCTTCTGATCAAGGTTTTCTTTCTGATTTGA | | | | | |
| cov_86.318817 | | CTGTTCAAGGCTCCGGTCTATCTGGTTTTTCTTCAC | | | | | |
| RAD_kmer_0000552_1_TGCAGGATACAATGAACCATTCCAA | 415 | ATGCCCTTACATCCTCTGAAAATGATCTGGGCCCTAGTCAGG | A | G | G | — | GYSNP0158 |
| TTTGAACCTGCACTTGTAAGATTCACAGAATTATCAATAG | | CTTCTGATCAAGGTTTTCTTTCTGATTTGACTGTTCAA[G/A]GC | | | | | |
| TAGAACTTATTGGACCCAGACCGTGA_NODE_1_length_574_ | | TCCGGTCTATCTGGTTTTTCTTCACTAGTGGACGAAATCTTTG | | | | | |
| cov_86.318817 | | AGCAAGAAAAGCGATCTTCTGCACCTGCGTATTCT | | | | | |
| RAD_kmer_0000557_1_TGCAGGTTCTTGCTCTGAAAGTGAG | 183 | GTGGTGGATATTCTTTCAAAATTAGCAACAGAGTTGAAAAGT | G | A | A | R | GYSNP0159 |
| GTTCTCTCTGCAAAGATATGATATAGTAAGTTAGACAATA | | CACGATTAAGTGAGGTGGTGGGTGAAGGTTTAAATCCC[A/G] | | | | | |
| ACATTACGGTAACTTTGATAAGCATC_NODE_1_length_574_ | | GTTCAACGGTCAATGTGGCTGATGAAGTCAAAGTTGACCGTT | | | | | |
| cov_87.775261 | | TAACGGATAGACCGAATACCTCAAAAAAACCAATGCCT | | | | | |
| RAD_kmer_0000557_1_TGCAGGTTCTTGCTCTGAAAGTGAG | 348 | TCTCATTTATGTCAAGTACATCACAAAAAGCGCTTCAGTCAG | — | C | C | Y | GYSNP0160 |
| GTTCTCTCTGCAAAGATATGATATAGTAAGTTAGACAATA | | CTTTGGCTTTTGCATCTGAGTTAAACTTTGGTGATAAG[C/T]CA | | | | | |
| ACATTACGGTAACTTTGATAAGCATC_NODE_1_length_574_ | | AAAGTTTGACCATTGTCTTCCATGAAGAATTTAACCATGCCA | | | | | |
| cov_87.775261 | | ATTGTGAAATGGGATCGAAGATTGCTAAACGTTTAA | | | | | |
| RAD_kmer_0000557_1_TGCAGGTTCTTGCTCTGAAAGTGAG | 483 | GGGATCGAAGATTGCTAAACGTTTAATTCCTAGGCTTGTCTG | — | W | A | W | GYSNP0161 |
| GTTCTCTCTGCAAAGATATGATATAGTAAGTTAGACAATA | | CTGACTGATTTTGGTTAATCTACAACTGAATTGTAAGT[A/T]A | | | | | |
| ACATTACGGTAACTTTGATAAGCATC_NODE_1_length_574_ | | CATCATATTTTATTTATATACAGCTGATGCTTATCAAAGTTAC | | | | | |
| cov_87.775261 | | CGTAATGTTATTGTCTAACTTACTATATCATATCTT | | | | | |
| RAD_kmer_0000562_1_TGCAGGCAAGAGCCGGTCTAGATTA | 243 | AACCCGCCAACCCGATCAACATGTACAATTTGATCACTACCT | C | G | C | C | GYSNP0162 |
| TGAGTCTTCATATGGAAAGGAACGACCCAATGATACTATT | | GACAAACGCTCTCAACACATTTACATAAATGGGTTAAA[C/G] | | | | | |
| TTGAAACTGCAAAGGACAACACCGTA_NODE_1_length_658_ | | AGGTCGTGTTGGGATTGCATGATCTTAAGTGTGTTTGGGTTAG | | | | | |
| cov_150.837387 | | AGTTGATTGTTTTTTACACATATATGCCTCATGTCTG | | | | | |
| RAD_kmer_0000562_1_TGCAGGCAAGAGCCGGTCTAGATTA | 485 | CAACTTTATAGAAAGCTTGTGTGTTGGTGAGGGAGGTGAATA | A | R | A | R | GYSNP0163 |
| TGAGTCTTCATATGGAAAGGAACGACCCAATGATACTATT | | GTGGCATACCCGTAGTAACGATCTTTGATATTCTGCTG[A/G]G | | | | | |
| TTGAAACTGCAAAGGACAACACCGTA_NODE_1_length_658_ | | ATAACTCGCCAGTGACAGGCATCTCATGCCTGTAAGGGCATT | | | | | |
| cov_150.837387 | | CAGCACCTCTAGTACATTCACCTCTGATGAAGAAACT | | | | | |
| RAD_kmer_0000564_1_TGCAGGCTGGGCTACTTAGTGCATA | 189 | TTATATTGAAAACTGATTATAGTGATCACAAGTTAGGAATAC | T | A | A | T | GYSNP0164 |
| TGTCATAAAAAGACTATATTTTGGAAGGTATATGGATTAG | | TTAGATAATCAGTTTCAAAGCGTGTATACAGAACAGAC[A/T]C | | | | | |
| GTTATGGAGGGTAACAAAAAACAAAA_NODE_1_length_593_ | | ACTGTAATAGAGGAGTAGACATACTTGGTTGTAACTCTTGAT | | | | | |
| cov_110.580101 | | TTCTCTGTGACATTATGCCAGGTGTAATGAGACATCA | | | | | |
| RAD_kmer_0000570_1_TGCAGGGAGTGAGCTTTTGACTGAT | 236 | TTTTAAGAGTACCTAAGCTATTAAGTGAAGGTGTGTGCCAGA | M | C | M | M | GYSNP0165 |
| ACCACTAAGGTGAGATGCAGCAAAAGGATTAAATTATTA | | AGTGCATACACTTCTTGTCACCCCACTGATAATAAGAA[C/A]A | | | | | |
| ATTGTTTGTCAAGTCAAATTATGCATA_NODE_1_length_589_ | | CGAGCATCTAATGATTTGTTTTGTCAGCCACTATGTCCTTACG | | | | | |
| cov_123.723259 | | AATGATCTACATAAAAGAGTTGGAATTTGCCTACTA | | | | | |
| RAD_kmer_0000576_1_TGCAGGTAATGCAAAATCTGTAAGG | 141 | CTGACTCCTGGTCAATCGAATTTTTTGGATTTTTAAACATAGA | A | T | W | T | GYSNP0166 |
| AGATGCTCATCTAATTATTGTGCTTTCAAATTGTGTATAAT | | TCTGTTTTTATTTATTTATTTATTTATTTATTTTTAC[A/T]AAAA | | | | | |
| CAACTTCTTTAGGATACAGTGATTA_NODE_2_length_268_cov_ | | CATGAGTTGGACCCCTTAATTGTAACAAGTAAAGAAAAGAAC | | | | | |
| 66.130600 | | CTTAATGTGACCCTCGACTAAGAATTAATGGTTT | | | | | |
| RAD_kmer_0000576_1_TGCAGGTAATGCAAAATCTGTAAGG | 201 | ATTTATTTATTTATTTTTACAAAAACATGAGTTGGACCCCTTA | C | C | T | C | GYSNP0167 |
| AGATGCTCATCTAATTATTGTGCTTTCAAATTGTGTATAAT | | ATTGTAACAAGTAAAGAAAAGAACCTTAATGTGACCC[T/C]C | | | | | |
| CAACTTCTTTAGGATACAGTGATTA_NODE_2_length_268_cov_ | | GACTAAGAATTAATGGTTTCGCCGCTGTACAAGTGTGTTGTA | | | | | |
| 66.130600 | | AGACTAAATGCAGCCGGGTGATCATAATCATAATCAC | | | | | |
| RAD_kmer_0000578_1_TGCAGGGAGTATATTAATCACAAGG | 453 | ATATTATATTATGTCCATGTTGATACGCGTCTGTGTGCAAAAC | A | G | A | G | GYSNP0168 |
| AAATGTTAGGAAAAAAAAACAGTTTCAACATTTCAATGTA | | TACGACTATGTCTGCAGCCTTCAGTTTAGTCATATAT[A/G]GT | | | | | |
| TTAAATATGATCCCGAAACAACAATA_NODE_1_length_598_ | | CACTTGGAGCTCATCGTTTTATTTGGCTATAAGCAAACATGAT | | | | | |
| cov_119.416389 | | CTATGTCACAATATTTTTTAAAACACTTTTTACGA | | | | | |
| RAD_kmer_0000583_1_TGCAGGCCAGGTTTGGCTTTTCAAC | 330 | ATGAAGTTTAGAATATACAAAAAAGAGATGTATGCACAATTA | W | A | W | A | GYSNP0169 |
| AACTTGCATTTTTCATTTAGAGGTGGCAATGTATAACTAA | | CCACTCCCAGTTCATCTGGATACATTCCGCGGTTCGAA[A/T]A | | | | | |
| TTACTTATGAATGGGTCGATTTGGGT_NODE_1_length_428_ | | GTGGCCTCCTTTTGCAAGTTTAGCACGGAATGTCACCTAAGG | | | | | |
| cov_46.133179 | | ATAGAAAACATCATGTTAAATTTTCCTACTAAATATA | | | | | |
| RAD_kmer_0000584_1_TGCAGGTGTTTATGAGCTTATACCT | 519 | CCGAAATAAGAATCATCAAATAAAATCAGGAACAAGCCATTT | A | T | T | T | GYSNP0170 |
| TATTATAAGGATGAGAATACAGTTTTTTGATGTTTCCCCTC | | AATAAAAAAGAAGAAGATCAACATCTTGTTAATGTACC[T/A] | | | | | |
| CCTCTGTCACTGTGAATGTTCAGCA_NODE_1_length_613_cov_ | | GAAACTTTCCAGATATTATTGCATGATCATGCTGAACATTCAC | | | | | |
| 94.779770 | | AGTGACAGAGGGAGGGGAAACATCAAAAAACTGTATT | | | | | |
| RAD_kmer_0000586_1_TGCAGGCTTCCTAAACTCAAAGGTG | 202 | GAGAGAACATACTATATCAAACCATCTATGTCTTGTGTAGCA | T | Y | Y | T | GYSNP0171 |
| ACAATTGGTGGCGAGGTCATGCAAGAGCTTTTCTGAAATA | | AGCTCGCATTCCCTACTTAAACCATCAGTCAAGAGATC[T/C]T | | | | | |
| TGTAAATTTGCCTGCCGATGCGCTTC_NODE_16_length_324_ | | CAGGAGTTTCAGTACCCCGCACACAAATCACAACAGATTTTA | | | | | |
| cov_39.268520 | | TATCATGGACTGCCACAACAAAGTATGCTGCTTCACA | | | | | |
| RAD_kmer_0000588_1_TGCAGGCTGCATGAGCAGGTTATCG | 375 | CAGCCATTGTGCACAGAACGCTTTGGTGATATTTGAGGCGGT | C | G | C | G | GYSNP0172 |
| TAATTTAATCTATTAAATGAAGAAGGTGGATTTGTAATAT | | GCATTCCTTACAGCCTAGTCATGTGAACAAAACAAAAC[C/G] | | | | | |
| CTTATTTTATGTTGGAAGAAGCAATC_NODE_2_length_439_ | | ATGTGCGCTTCGCCTATGTATCAAGGTTATAGTCTTCCAAGGT | | | | | |
| cov_71.694763 | | CTGGTGACTGGTATGATTAACAAAAAAAAAAAAAAAA | | | | | |
| RAD_kmer_0000590_1_TGCAGGTCTGTGACCAATGCCCTAA | 347 | AGGGTTGGAACCGATTTCAACATCAAATTTATAACCATTATA | R | A | G | G | GYSNP0173 |
| CGTAAAATATGAAAGGGAAGGGAACTTTATCACTGTGGA | | TGTTTGTTTAAACACTGGTAAGTTAACTTAAGCAAGAA[G/A]C | | | | | |
| TATTGAGAAAGGAATGCAAGATGGACA_NODE_1_length_432_ | | AACGTTAAAACGGCTTACTTGTCCATCTTGCATTCCTTTCTCA | | | | | |
| cov_212.203705 | | ATATCCACAGTGATAAAGTTCCCTTCCCTTTCATAT | | | | | |
| RAD_kmer_0000594_1_TGCAGGCTCCTTTTCGGTTTTCCTAT | 125 | CTACTTCCATTAAAGTTCTGCACTTTATATTGGTGTCTAGACG | A | T | W | W | GYSNP0174 |
| TTATATCAATTCTCCTATTTACATCTCTTAACGAACGGTTC | | CCAAAACCAAAAAGACCAAAAAGTTTATAACTCCTAG[T/A]A | | | | | |
| ATTGTTCCTTTAGCCCGAAACATA_NODE_1_length_588_cov_ | | TAGCAAGCAGCCAATAGAAATTCTCCAGTTTGCCCTTATTTA | | | | | |
| 80.646255 | | AATTATTCGTTAACCAACTTCCTTTTGTTGCCATGTC | | | | | |
| RAD_kmer_0000595_1_TGCAGGGATGTGTAATATGCTTACT | 310 | CTAAATCAGTCAGTATATATTTATGTTATGTACAAGTAGATGT | G | R | R | G | GYSNP0175 |
| TCTGGCTGCTGGATGGGCTGGTGCGGCTTATGTGAGGTAT | | TGAATTAGCATGTATTCGATTCTTTTAGCATGTATTC[A/G]ATC | | | | | |
| CAAGTTGATATCTATAACCTATCATA_NODE_4_length_419_ | | AAAAACAATTCAGAAATAATTTGCTATTTAGATATTATGGTG | | | | | |
| cov_31.639618 | | ATTTTTAATGATTGTTGTACTTTATTATATTGATT | | | | | |
| RAD_kmer_0000596_1_TGCAGGGAAAATTGGATCGGATGAT | 282 | TAGTTTTATTTCAAAATAAACACAAGACAGGTAAAAATACTA | W | A | T | A | GYSNP0176 |
| ACGGAGAAATTGAATTTGACCCTTACGGTTTTCGCGGATC | | ACCACCCCTCTATCAATCTATCCTACACAAAACATTAA[T/A]A | | | | | |
| GGCTTGTTTCTGATTCGGAGTTGTAT_NODE_1_length_580_ | | AAAAGCCCAAAATCGTCGCGTAAAACCAAACAAATCCTCATA | | | | | |
| cov_99.875862 | | AAACCGCGCTACATCACTAAAACTTATTCTTATAATG | | | | | |
| RAD_kmer_0000597_1_TGCAGGTTTTCTGATCTGCAATGTTT | 231 | TTGGTTGTCAGAACGCACGCTCGTTATGAAACGGGCTTCTTG | C | M | C | M | GYSNP0177 |
| GTCAATCATAACCGTGTAGCAATAAACATCACGACTTAAA | | CTTGAAACTTATAAGTCGTCTTTGTGCAGAAGATGAAA[C/A]C | | | | | |
| CCCGTTTCTTCAATTTCACTTGCAA_NODE_1_length_619_cov_ | | GACAAAGCTCTTACGCTATATAAAGCACTTGATGCATCAGAT | | | | | |
| 130.004852 | | AACAGTTCTTGTAAGATATTGTACAGTAAACTTATAT | | | | | |
| RAD_kmer_0000597_1_TGCAGGTTTTCTGATCTGCAATGTTT | 387 | TATATCTATGTATTCCCGAGTTGGAGAAATGAAGATGGCTAG | Y | C | C | T | GYSNP0178 |
| GTCAATCATAACCGTGTAGCAATAAACATCACGACTTAAA | | ATGGTTTTTTGATAAAATGATTCAAAAAGGATTAACAC[C/T]G | | | | | |
| CCCGTTTCTTCAATTTCACTTGCAA_NODE_1_length_619_cov_ | | GATGCGGTTACCTACACGATGATGATAAACGGTTATTGCAGG | | | | | |
| 130.004852 | | GTGAATCACTTGAAGGAAGCTTATTATTTATTCAATG | | | | | |
| RAD_kmer_0000600_1_TGCAGGATTTGAGCTCCCAACTTTT | 199 | GACAAAAGTTGGGTTAGTTCGAACATGTGAAAAAATTGTAAG | T | T | K | — | GYSNP0179 |
| TGGTTATAGAGCACACCACTTATCCAACAGGATATCCTCT | | AATATATTGAAGTAGAATCGGTTTGATTGAGGCCATAT[G/T]A | | | | | |
| TGCGGGAGTTATTACTTGATTTAACT_NODE_2_length_284_ | | CAAGAATGATTCACTTTAAACAAATGAAACTATTATTTGAGT | | | | | |
| cov_42.665493 | | ATATCTTCTATAAAGGATCAGACCTTTTCATAGCTAA | | | | | |
| RAD_kmer_0000601_1_TGCAGGCGACCAAGGTTAATACGCC | 133 | TTTGCATATAAACACATGAGAAGTCCTTTAAATTAAAAAAAA | K | K | G | K | GYSNP0180 |
| TCAAGTTGTGGGTATAATACCAGGTTGGATACATAAAGTA | | AGAAGTTTAAAAAAGTAAAAATATTTTCTTAATTTATT[G/T]G | | | | | |
| TGTGACTTTTTGAGCAACAAAATCAT_NODE_1_length_381_ | | TTTCATCATGTATTTATATGCAAAAGCTCTAAAATAGTTATGT | | | | | |
| cov_54.089237 | | | | | | | |
| RAD_kmer_0000602_1_TGCAGGTGGCTGTTCTGATCCATTT | 236 | AAGATCCAAAATTCAAATTACAAAATTCAAAGTTATGCAACA | C | C | Y | — | GYSNP0181 |
| ACTTATAATTGGGTTGACTGGGGTCTGGGGGTATGCTTTG | | AGAATCTAGTTAACAACGCATGTAAAACACACTACATA[C/T] | | | | | |
| ATCTCTTAACGGGTCATGTCAAACAG_NODE_1_length_575_ | | GTCTAACCGCCCCGAGCTTCTCTTCTGGTGGCATCATGGAGC | | | | | |
| cov_79.353043 | | AGTTCGATGTCGACTCCATCTGGTGGTAACTGCACATA | | | | | |
| RAD_kmer_0000604_1_TGCAGGCATCAAGATAGAAGACAT | 162 | CTGCAAAACCACCCATCACATCCCGACCACAATCTTAGTTTG | T | W | T | W | GYSNP0182 |
| AAACGCCTCTTTTCTTGAAGTTGCACAATCAACTTGGACG | | TACGGATTGTATTCATCCTTTATGTGTAGCGTTTGCAA[T/A]AC | | | | | |
| TAGTACCGGCATTTATCGCATCTTATC_NODE_1_length_590_ | | TATACAAGAGAGTATCTGCGACTATTATTGTTCCAAATGCGC | | | | | |
| cov_110.149155 | | ATTCAACATAGACGTAGTTTGTGCTACAATGTATGA | | | | | |
| RAD_kmer_0000604_1_TGCAGGCATCAAGATAGAAGACAT | 238 | GCAATACTATACAAGAGAGTATCTGCGACTATTATTGTTCCA | T | Y | T | Y | GYSNP0183 |
| AAACGCCTCTTTTCTTGAAGTTGCACAATCAACTTGGACG | | AATGCGCATTCAACATAGACGTAGTTTGTGCTACAATG[T/C]A | | | | | |
| TAGTACCGGCATTTATCGCATCTTATC_NODE_1_length_590_ | | TGAACAGAAGATGGACCACCCAAGTCACCCTCACCAGCTGAA | | | | | |
| cov_110.149155 | | ACGTTGTTTCGGTCGGATGATATCCCGTTGTAATGCT | | | | | |
| RAD_kmer_0000604_1_TGCAGGCATCAAGATAGAAGACAT | 291 | AACATAGACGTAGTTTGTGCTACAATGTATGAACAGAAGATG | T | C | C | C | GYSNP0184 |
| AAACGCCTCTTTTCTTGAAGTTGCACAATCAACTTGGACG | | GACCACCCAAGTCACCCTCACCAGCTGAAACGTTGTTT[C/T]G | | | | | |
| TAGTACCGGCATTTATCGCATCTTATC_NODE_1_length_590_ | | GTCGGATGATATCCCGTTGTAATGCTTGTAACAGTGAACATA | | | | | |
| cov_110.149155 | | GTGGGACCTTCTATCATTGTACCACTTGTTTTTACTT | | | | | |
| RAD_kmer_0000604_1_TGCAGGCATCAAGATAGAAGACAT | 363 | CGTTGTTTCGGTCGGATGATATCCCGTTGTAATGCTTGTAACA | T | Y | T | Y | GYSNP0185 |
| AAACGCCTCTTTTCTTGAAGTTGCACAATCAACTTGGACG | | GTGAACATAGTGGGACCTTCTATCATTGTACCACTTG[T/C]TTT | | | | | |
| TAGTACCGGCATTTATCGCATCTTATC_NODE_1_length_590_ | | TACTTTAGGATCCACTTAGATTGTGCTTTGCTTCCACCCAAGT | | | | | |
| cov_110.149155 | | TACTTATCGAACAGTCTACGAATGGGAGTTTCAG | | | | | |
| RAD_kmer_0000605_1_TGCAGGGAGAGTTTTACATGGTGGAT | 502 | AGAAAAGCTTCAAAATCTCCGGTGAATTCAACTTTCATATAA | W | A | T | A | GYSNP0186 |
| TTTCGTAAACTCATGGCACTTGAATCATTATCAATTAGAG | | AGATGTTTTACTTCACTTGCGAGTTGAAGCATTTTGTC[T/A]AT | | | | | |
| GTGTTCAATGGTGTTGGGATGCAATA_NODE_1_length_566_ | | TGCATCCCAACACCATTGAACACCTCTAATTGATAATGATTC | | | | | |
| cov_109.492935 | | AAGTGCCATGAGTTTACCAAAATCCACCATGTAAAC | | | | | |
| RAD_kmer_0000611_1_TGCAGGCCCACCCATATTGCCACGT | 201 | TTTCTTGTTCAATTTTGGGATACCATCCACTGTTTAGCCATTTT | Y | T | C | Y | GYSNP0187 |
| CTAGTTTTGCTTCACCCCCTCCTCTCGCTTAATTGAGCATA | | CCTTTTAATTAGTACTTTTCTTATTTATACTCATCT[C/T]GCTCA | | | | | |
| CAGAAATCTTTTTCTTTTCTCATGA_NODE_1_length_609_cov_ | | TTAGAGATATTGCATAAACCACGTCAACCCGTTCATAAATAA | | | | | |
| 185.533661 | | TGGGTCCAAAATGCGACCTTTGAAAAGCATATT | | | | | |
| RAD_kmer_0000611_1_TGCAGGCCCACCCATATTGCCACGT | 514 | TTTAGATTTCATGCAGTATACAAAAGATGTGACTTACAGCAA | M | A | C | M | GYSNP0188 |
| CTAGTTTTGCTTCACCCCCTCCTCTCGCTTAATTGAGCATA | | ACAGGGTGAGTATGTATGCACCAGCAGTTACTCCCATG[C/A]A | | | | | |
| CAGAAATCTTTTTCTTTTCTCATGA_NODE_1_length_609_cov_ | | CATAACTGCACCAAGTCTGCAAAAGCAGATCATGAGAAAAG | | | | | |
| 185.533661 | | AAAAAGATTTCTGTATGCTCAATTAAGCGAGAGGAGGG | | | | | |
| RAD_kmer_0000618_1_TGCAGGACTAGTAGTACCATTTGAC | 314 | GTATTAGCTTTTACTAATATCACGTTGCATTCTTGAACAAAGT | C | Y | T | T | GYSNP0189 |
| ATGGATCCCGAGGAGGCTGCAACTGCTCGATTCTCATGAA | | GATTTATATATGAGGATCATTAAATAAACACTTTGGT[T/C]AA | | | | | |
| TGCTTAGTTGTCTGGTGAGTTTAGAG_NODE_1_length_528_ | | CTTCCGACCCGTACTTTATAATAAATCGTTGCTTATTTATTTTC | | | | | |
| cov_162.617432 | | GTCGGTGTAGTTCCCAAAGCACTCCAAGGATTGA | | | | | |
| RAD_kmer_0000618_1_TGCAGGACTAGTAGTACCATTTGAC | 380 | ATAAACACTTTGGTTAACTTCCGACCCGTACTTTATAATAAAT | T | Y | C | C | GYSNP0190 |
| ATGGATCCCGAGGAGGCTGCCTGCTCGATTCTCATGAA | | CGTTGCTTATTTTCGTCGGTGTAGTTCCCAAAG[C/T]ACT | | | | | |
| TGCTTAGTTGTCTGGTGAGTTTAGAG_NODE_1_length_528_ | | CCAAGGATTGAAGAGCTGCTTCAGGAGGACGGTAATGTTAAA | | | | | |
| cov_162.617432 | | CGTAAAAGAGAGAAAATTCAGAAACAATCCAGCCT | | | | | |
| RAD_kmer_0000619_1_TGCAGGATACCCGACTTGCATACAA | 498 | AGAGCTAGTTCACGTGTTATAGATTAGCACGCTAACATGTTG | A | A | T | T | GYSNP0191 |
| GACATTTGCTACACTATACTTCATTGTCATATTCGATGATT | | GTGAATGGCCCATTGGTCGTTAGGCTGCATAAAGAAAA[T/A]T | | | | | |
| CTGAATGAACTTGCTATACTAGA_NODE_1_length_624_cov_ | | ATAATTTAAACAAAGAGTAATATAATAAATGTCAAGACTCAA | | | | | |
| 106.498398 | | GGCATACCTTGCATTAGATCTAGTATAGCAAGTTCAT | | | | | |
| RAD_kmer_0000620_1_TGCAGGAAACGGGTAGATCAAATG | 486 | ACTCACCGACATTCGATTTTATCACAAAAGTATACA | G | A | R | — | GYSNP0192 |
| TATCATAGGAGTTGTTTCAACCGATGAACAAATTAAAAAA | | ATAAACTGAAAAACATATATAATTGAAATAAAGTAATT[G/A] | | | | | |
| GTATGGTTAGTTGCTCAAGCCATTAGA_NODE_2_length_587_ | | AGCATTTGGAACGTGAATCGGTTCATGGTTGGAACTCAAT | | | | | |
| cov_89.657578 | | GGCTTGAGCAACTAACCATACTTTTTTAATTTGTTCAT | | | | | |
| RAD_kmer_0000622_1_TGCAGGTACAATTATGGTACTGCGG | 337 | TACTGGTATTAAATATGCTAAGGTTGTGATCAGAAGTACTAC | T | W | W | T | GYSNP0193 |
| TTTCTACTAACTGATGCTTCAGATACCTGCAGATACACTC | | ATACTCATATGCTGCTTCACAAAAAAATATAGACACCA[T/A]T | | | | | |
| AATTAGGGCAACAGCAGAAAAGGATC_NODE_1_length_605_ | | TTATCTAGAAATTTTAGCCATTTATCTTTCATGTTCATAATGG | | | | | |
| cov_137.289261 | | TTGCAGGTTCTGGGTTTGAAAGGGTAAAAAACAAAT | | | | | |
| RAD_kmer_0000622_1_TGCAGGTACAATTATGGTACTGCGG | 521 | CGTAGTTATTGTGACGTCAAATTGTATGTGATAACTAACAG | A | W | W | A | GYSNP0194 |
| TTTCTACTAACTGATGCTTCAGATACCTGCAGATACACTC | | GTTCTACCTGTAAGCTACTTATGGTTTTTATAGTTTCG[A/T]CT | | | | | |
| AATTAGGGCAACAGCAGAAAAGGATC_NODE_1_length_605_ | | TGGTGATGTGATGCATTGATCCTTTTCTGCTGTTGCCCTAATT | | | | | |
| cov_137.289261 | | GAGTGTATCTGCAGGTATCTGAAGCATCAGTTAGT | | | | | |
| RAD_kmer_0000624_1_TGCAGGTAGGTAAATTTTAGTGTGG | 403 | TCAAAACCAAAACAGAAAACAATTACCAGTTTATCAGGTGCT | C | — | T | Y | GYSNP0195 |
| GTCAAAATGGGTTGGCTCAAGTTGGCCGACCCACAATCAC | | TAATGCAATAAAGGTGGTAATTTCAACTGATGGGTCAA[T/C]C | | | | | |
| TTGTTTAATTTTTTGTATACTTATCA_NODE_1_length_650_cov_ | | GAGTTATGTTTCATCTTTAAGGGGTCAAATGGTTTAATTTAAA | | | | | |
| 82.398460 | | AGGTTTATCTGAAAACGAAACATATCAAAATGGGTC | | | | | |
| RAD_kmer_0000627_1_TGCAGGCTCACATCATCGGTCATTA | 144 | TCTACAAATTTCTCTCTCTACCCACAGTTCATGTATCACTTAA | W | T | A | T | GYSNP0196 |
| TAACCTCGGACCCCTCCACATAACTCGACTTGTGTGTAAC | | GACGGTCTCAGTTTATCGACGTGTTCAACAGCAGTCC[A/T]GA | | | | | |
| CGAAGGATTCAGCTTGGCTAAAAGAA_NODE_1_length_567_ | | TGAAACGGCGTTTTTTCAGGTGATGTTGAACCGTGAAGGAGT | | | | | |
| cov_152.495590 | | CGTGGGGTCGTTAATAATGATTCAACCGACTCTTTC | | | | | |
| RAD_kmer_0000628_1_TGCAGGTCCATAATCCATTTGGACT | 254 | AGTAAATGCAAGAAAGTTACCAATACGATTAATAAACGAAA | Y | C | Y | C | GYSNP0197 |
| CCTCTTGGCCCAGAAGCTGTTAAGGCCCACATCTGATTCA | | ACAAGTTCAAACACAATTAACTGTTTAACTAAATCAACA[C/T] | | | | | |
| AAGAAAACGTGATCCAAACACAAAAG_NODE_1_length_601_ | | GAGTAGTCAAGTTATACTAGTTCATACAGCAAAGAACAACTG | | | | | |
| cov_128.712143 | | AAAATAAGAATTATAAACTGAAACTGTTCACCCGAGTA | | | | | |
| RAD_kmer_0000631_1_TGCAGGGTGCAAACAGAATCGGTTG | 272 | ATTGCAGATTATGCAGAATGAAAAAAGAATCAGGAATCCTTT | A | M | A | C | GYSNP0198 |
| CAGAAAAGATTGCACCGATTGCTGGAAAGAAGTTTGAAA | | TTTTCATATATCTCTGGTTTATGCTCTTATAGTACATA[A/C]AA | | | | | |
| GTTTAGCAAAATGAAGATGCTTAACGA_NODE_1_length_485_ | | TGGTTTTACAATTTAAAGACGTTGTACTAATTTGTGGACAGGT | | | | | |
| cov_108.101028 | | GCTACAAAGATCTTCCAGAAGATGAATATCAGTGA | | | | | |
| RAD_kmer_0000633_1_TGCAGGCTTGTCAAATTCTTCGTAT | 425 | CAAGTTCAGATATTAAAATTATAGGCATCAGTAACACAAAGA | K | K | T | K | GYSNP0199 |
| AATTACATTCTATTCAACTGTACTGCCTGGTCCAAACTAC | | AAATTATGACGAAAAAAATAAGCGAACTTACTGATTAA[T/G] | | | | | |
| CATTGTCGCGAGGTATATTGTTCTCT_NODE_1_length_640_ | | AGTGTTTCAAAGATATTATCGGGACGAGGTAATGTTGCAAGC | | | | | |
| cov_153.359375 | | CGTGAACCCTACAATCATAAACAAAAACTTCAAACTTA | | | | | |
| RAD_kmer_0000649_1_TGCAGGTATGGGCTGTATTGAAACC | 147 | ATATCACTTAGATTGAATGTCTTGAAGACCCATACTGATTGG | R | R | A | R | GYSNP0200 |
| TGGATTCTTAGCCCTGCTAAAAGATCCATTTGATGCTGAG | | AGGAAAATGGAATTGACAAAGTTGGAGGAAAACTAAAA[A/G] | | | | | |
| CCATTGGACATAATTGTCTTTGATGT_NODE_1_length_509_ | | AAGACATGATTTAAAAAAGGAGCAAAAACAAGCAACATAA | | | | | |
| cov_204.919449 | | ACTAATTGTGGACATACAATATGTTAAGTAAATATGGCAA | | | | | |
| RAD_kmer_0000649_1_TGCAGGTATGGGCTGTATTGAAACC | 199 | AATTGACAAAGTTGGAGGAAAACTAAAAAAAGACATGATTT | G | G | A | R | GYSNP0201 |
| TGGATTCTTAGCCCTGCTAAAAGATCCATTTGATGCTGAG | | AAAAAAGGAGCAAAAACAAGCAACATAAACTAATTGTGG[A/ | | | | | |
| CCATTGGACATAATTGTCTTTGATGT_NODE_1_length_509_ | | G]CATACAATATGTTAAGTAAATATGGCAATGATACATGAAA | | | | | |
| cov._204.919449 | | AAGAAAGCCATATCTTAGTAAAGCACGTCTCCTAGGAAGT | | | | | |
| RAD_kmer_0000651_1_TGCAGGGGGCGCCTGGCAAC | 202 | GACATATTTTGGAGCCGAAACTTCTATAGGCTTTTTGATTTGC | Y | T | T | C | GYSNP0202 |
| ACATTGATGCAACTTTGGGTAGTGGAAACCTGAGAGAAG | | ACACCATCAGCCCATCGGTACTCATACCTGTAAATTT[T/C]AT | | | | | |
| CTGTGAGACTTCCTCCTGGGGAGGATAT_NODE_1_length_588_ | | TTAAATAAAAATTTAAGGATCATGTATGTTTATATATAAGAT | | | | | |
| cov_137.096939 | | AGATTAATTTTAATAAACAAAAAGAATCAGTATAAC | | | | | |
| RAD_kmer_0000653_1_TGCAGGATTGTAAATGAAACCAC | 394 | ATGATTGGTGTTTTACTTCTTAACAATTCATATTTCAATTATG | Y | T | Y | T | GYSNP0203 |
| AATTCAATTAATGCAAAGTATCTTATGATCAAAACAAATG | | TGGGTTGCAGTACATCTATATGTAATATGATGGCAAA[T/C]TG | | | | | |
| TTCATATGAATTTCATTAGTTACAAT_NODE_1_length_457_ | | TAACTAATGAAATTCATATGAACATTTGTTTTGATCATAAGAT | | | | | |
| cov_100.118164 | | ACTTTGCATTAATTGAATTGTGTTGTTTCATTTAC | | | | | |
| RAD_kmer_0000654_1_TGCAGGGATACCAAATTTGGGTGTT | 153 | ATTGCTGGATTGATAGGTGGCGTTTTTAGCTTAGCTTTGTTGA | R | R | G | R | GYSNP0204 |
| TAATGTCACCAAGTTTCGTTACTTCTCTTGCAAATTCTTTC | | CATTCATCATGTGGTATAGAACTCAACAATACCAAGA[G/A]A | | | | | |
| TTCCCTTTGACAATCCCTTCCTTCA_NODE_1_length_279_cov_ | | GGAACCACTCAAAACAAAGTGCTGAAAAACAAGGGAATCAA | | | | | |
| 12.491039 | | CAAGAAATATCTTCGGTTCTTGCCACATCAGCACCTAA | | | | | |
| RAD_kmer_0000655_1_TGCAGGGGTACTTAAATTAGCCA | 145 | TGCCTTAGTGAAGAGGGGTGCCCTTTCTAATTCTTGAAAAGG | G | G | G | A | GYSNP0205 |
| AATATAGGGAAAAAAACGCATGCATTATCATGCTGTACA | | AAAACTGTATAGCTTCCCTATGGAGACTAAGATCTAAT[G/A]A | | | | | |
| ATGGTACATTTTAGTCATTGTACCTTT_NODE_1_length_569_ | | CTCCCTAAGACTTCACTTAACCAAGATATTTTGTCAGCTTCCT | | | | | |
| cov_133.080841 | | CAAAAGCAGTTTCCCAGAGAGTATTCAGTATATCCC | | | | | |
| RAD_kmer_0000659_1_TGCAGGATTGGAAGGTCAAAACGCT | 318 | AACAAATTCATTAACGTGGTAATCTTTATAGACCCAAACAAT | A | A | A | C | GYSNP0206 |
| CCGGTAAAGCATTAATCATTTGGCTATGGATTGTCGTTTA | | TGAAAATGACATTCATTTTGAGAAACAGAAATGTAACA[A/C] | | | | | |
| TTTTGTGTGTCGGTTATTATCTAGTT_NODE_1_length_433_cov_ | | TAAATGTTCATTTTTTTTTACTGAATACCAGTTTTGAGCATCA | | | | | |
| 94.254044 | | ACAGAAAAACTAGATAATAACCGACACACAAAATAAA | | | | | |
| RAD_kmer_0000670_1_TGCAGGCTAAAACAATAAATCAGCTCT | 176 | TGTGATCTTTTCGGAAAAGCGACTTTTTTGCTGGTCTTTTAGT | T | A | A | T | GYSNP0207 |
| TTGATTCGGCCCTATATACTTATATCAGACAAAGCATCA | | TGAATTACTAAGTTTTTTTTTTAGTTTTTAATTTTTA[A/T]TTTT | | | | | |
| CATACAACATCTACGAAAACCCTGCG_NODE_2_length_252_ | | TTTTTAAATGTGTGATTTAATTTTGATACAGATAAGTCAAAGG | | | | | |
| cov_38.940475 | | GTGTTTGAAGTTATGAGGAAGAAAGGGTTAGAT | | | | | |
| RAD_kmer_0000679_1_TGCAGGTCTTTGATTTTAAACCGAT | 88 | TGAAATCTGAATTTGATGAATATGAACTCTAGGTATTCTTTTG | R | R | R | R | GYSNP0208 |
| ACAACCAACACAAAGGGTTCAAATCAGCTGCAAACCCAC | | GGGTTATTTCTTTTGTTATATAAGCTCGATGATGACG[A/G]GC | | | | | |
| CATCATACACCCTTAGCCAACAACATA_NODE_1_length_196_ | | CAATGCTCAGTTGAGAGCTTCTTGGATGTGTGGTTTCATGCTA | | | | | |
| cov 262.433685 | | TGTTGTTGGCTAAGGGTGTATGATGGTGGGTTTGC | | | | | |
| RAD_kmer_0000684_1_TGCAGGCTGCAACTTATGTCTTTAC | 407 | CAAGTTGCTTATACTCAAAGCAATCTAGTTTTGTGTAATTGTT | Y | C | C | Y | GYSNP0209 |
| TCTATACATAGCCCAATAAGAAGTGTTTATATTGTGCCTA | | ACTTACGTAACTGGAACAGGCAGTTGGTGTATAATAG[C/T]TA | | | | | |
| ATACTCTCCAATAATTACTGATCATT_NODE_1_length_578_ | | AGAATAGAGGAAACCTCGGGTTAATTTATACCGGTAATTCTT | | | | | |
| cov_139.062286 | | TTAAATATATGTGTTGCAGTCTGGTAAATGGTTTTG | | | | | |
| RAD_kmer_0000687_1_TGCAGGGTAAATGCAGTTTTCTTTTT | 293 | CCCTAGCATTTAACAAATATTATCTCTATTTTAGCCTTGGTTG | R | G | G | R | GYSNP0210 |
| GGAGTAGAAACATGATTGATTTTCATGTCATTTCGACGTT | | ATAGACCCTTCAAAAATTAAAATAGAAGTTTGACTTT[G/A]AA | | | | | |
| CACATTGGTATCTTAACAATCTATT_NODE_1_length_652_cov_ | | AGTCATCCTTTTCCTGATGTGTCAAAATGTGTGGTTTGGGTAA | | | | | |
| 68.575157 | | TGGGTCAAAGACGTAACATTTCGTATGGACTAGCC | | | | | |
| RAD_kmer_0000687_1_TGCAGGGTAAATGCAGTTTTCTTTTT | 372 | TGAAAGTCATCCTTTTCCTGATGTGTCAAAATGTGTGGTTTGG | S | G | C | G | GYSNP0211 |
| GGAGTAGAAACATTGATTGATTTTCATGTCATTTCGACGTT | | GTAATGGGTCAAAGACGTAACATTTCGTATGGACTAG[C/G]C | | | | | |
| CACATTGCTATCTTAACAATCTATT_NODE_1_length_652_cov_ | | AAGTTTGGTTGACCCCTAACAAAATTCTATTATCCTGATTCAA | | | | | |
| 68.575157 | | ATTCTGTTTTTTTTTTTTTTTCCTGAATAATATGAT | | | | | |
| RAD_kmer_0000688_1_TGCAGGCGAGATGACGATGACGATT | 217 | TTTTAATCTTTTCCAAAGATTTACTTAAAAAATGAAAACATGA | G | — | G | A | GYSNP0212 |
| GTGAAGAAGATGACGATGATCTGGCAGGGGTTGAGATTG | | GAAAGTCGGTGATAGGCCATTGGGCTTGACCCACTTT[G/A]GT | | | | | |
| CATGGAAGCATGAGGCAGCTGCCATTG_NODE_1_length_597_ | | TAAACCACTTTGATCTGTAAAGAAACGGGTTGACCCGTAGAA | | | | | |
| cov_103.852600 | | CCCACCCGGAAAACCCAAGTACTTGCTTTTGTAAAA | | | | | |
| RAD_kmer_0000691_1_TGCAGGCTGCTGCTATCGTTTATTTT | 197 | TGTTATAGTCAAACATCACTACAACACACCACTCGGTGCCCA | W | A | W | W | GYSNP0213 |
| TCAACCTTGGCCGCTAGTCACCAACCCATCTATGATTTAA | | AAAGCCCTTGAGCGGGAATCATTTGACACCACCACACA[T/A]T | | | | | |
| TTCTTTCTTCTATTTCGTTTTTGTT_NODE_1_length_617_cov_ | | TTTCATTTTTATTTCTTTTATTTAATTTTTACTTAAAAAAACTA | | | | | |
| 128.870346 | | CACCCATGTGAAATGATGATTTAGTTAAAGGTTCC | | | | | |
| RAD_kmer_0000691_1_TGCAGGCTGCTGCTATCGTTTATTTTT | 340 | GATTTAGTTAAAGGTTCCCTGGCTACACGGCAATGACGTAGC | W | T | W | W | GYSNP0214 |
| TCAACCTTGGCCGCTAGTCACCAACCCATCTATGATTTAA | | ACTTTAACAATAACGTGTGGCTAAACCACTACATTTAG[A/T]C | | | | | |
| TTCTTTCnCTATTTCGTTTTTGTT_NODE_1_length_617_cov_ | | TAATCTCTTACTAAATGCATTAATATAATTATAATATAATGTG | | | | | |
| 128.870346 | | TTTTACATTATATGTTTTTTTCTACACATTGTAATT | | | | | |
| RAD_kmer_0000693_1_TGCAGGTTTTTGTACAGCACCCATT | 354 | ATGTTGGGCGAGCTTAAAAAGCTGATTGAAGCGAATCCTCTT | A | M | M | A | GYSNP0215 |
| AATGGGTTATTTACAGGGGACGGAGCCCTGGCACCATTTG | | TTTCGTGATAAGCTAAACTTCCCAGCTTTGAAAAATTC[C/A]A | | | | | |
| GCTGTGACTGTCCACAAGAATGGTCA_NODE_1_length_601_ | | GATTGCGTACACTTATCAATCAAAGGTTCATATTAGATACTCC | | | | | |
| cov_148.986694 | | CCGTATCTGGGTCTGACATTTCTTGTTCAAGTTCAC | | | | | |
| RAD_kmer_0000695_1_TGCAGGTGCAATCAAGATACATGTC | 232 | CATTTTTATCCCGTTAAAAAGCTTAAATGCTTTTCAAGACATT | G | G | K | — | GYSNP0216 |
| CCTAAATGAATGGTTTTCTCTGAAATAAGTGGTTCACTAC | | GGCATACTAACTTAGTATACTTTAGGGTAGTTTATCA[G/T]AA | | | | | |
| CTTTAAGGTAATCACAGACCATGATG_NODE_1_length_552_ | | ATTCGTATTTATCATGTTAGAAAGCTTATATGTTTTTTTTCAA | | | | | |
| cov_176.846008 | | AATTCCATTTATATAACTCCAGTTATGTGCTGCCT | | | | | |
| RAD_kmer_0000697_1_TGCAGGTGTGAAAGTTTCACTGGAA | 253 | ACCTACCTAAATGAGGGGCGTTTTGGACTTTTTGCTTATGTTT | A | T | A | T | GYSNP0217 |
| AAGAATAACATTTGGGCTTTGGTTGTTTTGATTGTAGGAG | | ATATCAATAAATACTCTTTATTTATGTTGTTCCCCTT[A/T]TAA | | | | | |
| GGTTGGTTGTTTTTTGTTGCTTGATA_NODE_1_length_560_cov_ | | ACCAAAGTAAACCCTAAAATCACATGGGTTGAACCGGTTATC | | | | | |
| 107.194641 | | AAACTTCTATTAAAATTATTCGTTGCAGCCTGTAA | | | | | |
| RAD_kmer_0000702_1_TGCAGGTCCCTTTGGTTGCAGGCAC | 229 | CGAAAAAAAAAGTGATCACAAAATTGCTTGAGATAGACAAA | T | T | T | C | GYSNP0218 |
| AGTTAACCGTGGTAGTGAAGTGATTGCCGGTGGGTTAACC | | CAGAATTCGGTAGCAGGGGCAAGAAGGACATAGACAACA[T/ | | | | | |
| GTTAATGACTGGACTGCGTTTTGCGG_NODE_1_length_505_ | | C]GAAAACTGATCACAAAAGTTGAACATATAGAGACAGCCTA | | | | | |
| cov_182.188126 | | ACTTTCAACAACATACAAAGTTAAAAAAAAGGAACATAAG | | | | | |
| RAD_kmer_0000714_1_TGCAGGCACAACCTCACTACCATTT | 530 | AAGCAAAACAAGTAGAACAAACAAAAAAAAAGTTTATTGTT | T | T | T | C | GYSNP0219 |
| CATTTTGACAACTTTAAACTTTTTTATTTGTCACACTTTAA | | AAGTGGAAATTGATTCATACTGATTGCTAAAATAATGTT[T/C] | | | | | |
| ACTTTTTTATCGTTACGTCTTAAAA_NODE_1_length_628_cov_ | | CTACAAAGTAAAGAATGTTGGATGATCCATTTGTTTTAAGAC | | | | | |
| 63.117836 | | GTAACGATAAAAAAGTTTAAAGTGTGACAAATAAAAAA | | | | | |
| RAD_kmer_0000722_1_TGCAGGGAGACTTGTGTGCCG | 201 | GAATATGAACATATGATAACGCTGCTTCATTTATGTTTGTGAA | C | M | M | C | GYSNP0220 |
| AGCAAATACAAACGAGCCATGTTCATGTTCGTTCATTTTA | | CGTTCATTTGGTTCATTTGAATTTGTTTGTGTCAGTT[C/A]GTT | | | | | |
| CTTTAACTAAACATATGATCGAACAT_NODE_2_length_517_ | | CGTTTACAGTAATATCCGTTAGTTTACGTTCATTTATTCGTTT | | | | | |
| cov_61.665379 | | ATATTTCTAGATTCATTACAATTTAGTCTAAATT | | | | | |
| RAD_kmer_0000726_1_TGCAGGCATATAAACAACAAGACG | 353 | AGGATTGGAAGCCTAAGAAAATTCACTCGGATCACAAACAAT | A | M | A | — | GYSNP0221 |
| CTGAAATTACGAACCACCACTAACAATAACATCAAATTAA | | TGTTCACACGTACAATACTAATTGTGATGAATTACGTT[A/C]G | | | | | |
| TAGGAAGCAGAAGGAGATGAATCGAAG_NODE_1_length_576_ | | AGAGAGTATAAATTACAACAAAAATGTATCGTTTAGTGTAAA | | | | | |
| cov_78.984375 | | GAAACTGAATTAAAGAGTACCTGAAGAAGAAGAA | | | | | |
| RAD_kmer_0000730_1_TGCAGGCTCATAAACTATTTTCTTTT | 131 | CAAAATCCATAATCCCAAAACCATTCTACGTATCTGAACCGT | C | C | C | T | GYSNP0222 |
| TGTTAGTTCTGCACTTAAGTATGTCAATGACTCAATGGTG | | TTCTTTAAAATGACCCGCGACGGGAATACGGTTGTTAC[C/T]G | | | | | |
| TCAGACGTTAGGACTCTTTCAATA_NODE_1_length_546_cov_ | | TCTTGCTTATTTGTGGTACCAAAATTCGCTACAGCAACCGGTA | | | | | |
| 117.739929 | | AAAAAAACCTAAGTTAAAGAGTATTTTTATCAAAAG | | | | | |
| RAD_kmer_0000736_1_TGCAGGTGAACTACTCTGCCTGAGC | 494 | TCCTCTGGTAACACTGGTAGTGGTTCAAGTTCTAATTAATA | G | K | G | K | GYSNP0223 |
| AAATTATTGGGCAGATCCATAGATGAAGAAACGGGTCGG | | ATATTATTAATCAAGTTGAGAGCTTTGAAAAACAGTT[G/T]AT | | | | | |
| GTATTTTGACCCGGTTGACCCTGAAAC_NODE_1_length_624_ | | GATGGATAATATAAAGCAAGAACAAGATGGGGCTTATGTTTA | | | | | |
| cov_115.104164 | | TCAGAATCAAAGTCAAAGTCAGTTTCAGGGTCAACC | | | | | |
| RAD_kmer_0000737_1_TGCAGGTAAAACCGTAATAACCAGT | 270 | CGTACGTACATTACTCTAATGTTGAATTAAACATAACAAAAT | T | C | Y | Y | GYSNP0224 |
| GATCATGCACTAAAGTTAGAGACAGTGCCTGAGTGGATA | | ATTATGACAAGCATCCTATAACCTTAAGCTTGACAACC[T/C]G | | | | | |
| GTTATTGTTGGAAGCGGTTACATTGGT_NODE_1_length_547_ | | GATTATATCATTTACATGGAAAAACACAAACACATCAAGCAA | | | | | |
| cov_173.469833 | | CAAATAAACCGGTTCAACGTATATGAGGTAAAAACAA | | | | | |
| RAD_kmer_0000739_1_TGCAGGCTGCACTAAAAAGCAATCA | 172 | ACATAACAATATACTAATTAAATTTTATATATATTACATTAAT | S | S | G | S | GYSNP0225 |
| AGCTTAAAAATTTATGATCTAAGACAGTGTTGACATGATT | | TAAGTATGATGTCATCTGGTTCAATGGTACGACCGAT[G/C]AC | | | | | |
| ACCTGGACAATCATCGCGTGGAGTTC_NODE_1_length_567_ | | CGATCTGACCATTAAACCAGTAGTGTGGTCCGATTAGTCCAC | | | | | |
| cov_136.061722 | | GTTTGATTTTATAAGTTAAACGAGTTATTTTTACAT | | | | | |
| RAD_kmer_0000739_1_TGCAGGCTGCACTAAAAAGCAATCA | 268 | AAACCAGTAGTGTGGTCCGATTAGTCCACGTTTGATTTTATAA | K | K | G | K | GYSNP0226 |
| AGCTTAAAAATTTATGATCTAAGACAGTGTTGACATGATT | | GTTAAACGAGTTATTTTTACATTGGATATGATAAGAG[G/T]TT | | | | | |
| ACCTGGACAATCATCGCGTGGAGTTC_NODE_1_length_567_ | | TGAAGTTGAGAAAATACTAGATGATGTTAAACTATTAATGGT | | | | | |
| cov_136.061722 | | AATCCGAGTTTTGACTATTATCGATCGATTAATGCA | | | | | |
| RAD_kmer_0000740_1_TGCAGGCTGAGACGGTCTGCCACTC | 323 | ATGTTCATTGGGGCATTTCGTCGAACAGGTTAAGGGCATATG | Y | C | Y | C | GYSNP0227 |
| CGCCACCTGGTTCGATTCCAGCTTTCTTGCACCGTTTATAT | | TTTGCCCTTAAACAAACTACTTGTAATGAATTTTATCT[C/T]CA | | | | | |
| TGTATCTGGGTGTTCTAATCCTAAT_NODE_1_length_609_cov_ | | TTGATGAACATGGGATTCATTATATTTGTTCTTACTGAATTAT | | | | | |
| 209.612473 | | TATCTCGTTTTATTGAATAAAAATTGGTGGGTTAG | | | | | |
| RAD_kmer_0000746_1_TGCAGGTTAACCAAACTGAATATGG | 96 | ACTCACAGTTAGCCAATGAACCATTCATATTTTACAAACATTT | — | G | C | G | GYSNP0228 |
| TCTAACGTTTTCTTGAATCATAATATAAACCAAAGTACGT | | CTAGCTTTTATATCTATAAAGCAAAAAAATAACGCAG[C/G]TT | | | | | |
| AATAGGTTAAAAAACAATTTGATTAT_NODE_1_length_575_ | | TGGTTTTAGTTATTAACAGATTCGAACTGAAAATCATCAATAT | | | | | |
| cov_73.747826 | | GACCGAATAAACCGAAAACTGATTTGTTAATAACA | | | | | |
| RAD_kmer_0000746_1_TGCAGGTTAACCAAACTGAATATGG | 278 | TTTTTGTTGAGGTTAATAACCGAACAAAACCGAACCATGCAT | — | A | G | A | GYSNP0229 |
| TCTAACGTTTTCTTGAATCATAATATAAACCAAAGTACGT | | ACCCTTGTCAGTGGCTATGTTTCCCGTTGCATCGCACG[G/A]A | | | | | |
| AATAGGTTAAAAAACAATTTGATTAT_NODE_1_length_575_ | | CACTCTTCTAGTATAGAAGAACCTATAATCGGTTGTATTTTAT | | | | | |
| cov_73.747826 | | TTGCATGGGTTATAAGATTATCCCTCATCAATATCG | | | | | |
| RAD_kmer_0000746_1_TGCAGGTTAACCAAACTGAATATGG | 334 | CTATGTTTCCCGTTGCATCGCACGGACACTCTTCTAGTATAGA | — | T | A | T | GYSNP0230 |
| TCTAACGTTTTCTTGAATCATAATATAAACCAAAGTACGT | | AGAACCTATAATCGGTTGTATTTTATTTGCATGGGTT[A/T]TA | | | | | |
| AATAGGTTAAAAAACAATTTGATTAT_NODE_1_length_575_ | | AGATTATCCCTCATCAATATCGTATTTCTCGGAAGACTTAATC | | | | | |
| cov_73.747826 | | CAGAAACCTTGACCAGCCTACACTAAATTTTTGTG | | | | | |
| RAD_kmer_0000746_1_TGCAGGTTAACCAAACTGAATATGG | 445 | TCGGAAGACTTAATCCAGAAACCTTGACCAGCCTACACTAAA | — | T | A | T | GYSNP0231 |
| TCTAACGTTTTCTTGAATCATAATATAAACCAAAGTACGT | | TTTTTGTGAGCCAATGATAATCATGCTTGTAGAAAAAT[A/T]A | | | | | |
| AATAGGTTAAAAAACAATTTGATTAT_NODE_1_length_575_ | | AATTGAATTTTATCAAATATAAGAAACCTAATTACTTATAGC | | | | | |
| cov_73.747826 | | AAGGTATTGATGTAAACTACAATAATCAAATTGTTT | | | | | |
| RAD_kmer_0000748_1_TGCAGGGGCGTATGCTATGCATGGT | 112 | TTATATTCTATTTAACCAAATGAGGTTTTCACACAATAAAATG | R | A | G | G | GYSNP0232 |
| TTTCGCATGAATTTGGTTGAGTTATGAACGATTTAGACTTT | | CTTCTATGTGGAGTAATTGAAATCTGTAAAAAGCAAA[G/A]GT | | | | | |
| AGATACACTTACATAGATTAATTAT_NODE_1_length_618_cov_ | | ACCAGGCATCATCTCCCTAATAAACAAAGGTATTGATGAGAT | | | | | |
| 152.051773 | | GGAAGCGACCATCTTGGGAGACTGATTACATTTGAT | | | | | |
| RAD_kmer_0000748_1_TGCAGGGGCGTATGCTATGCATGGT | 513 | AGTTTATAACAAAGATCAACAAAAAGAGGTGTTTGATTCATC | R | G | A | A | GYSNP0233 |
| TTTCGCATGAATTTGGTTGAGTTATGAACGATTTAGACTTT | | TCTTGCCATCCTGATCACTTCAACCTTCGGTGCCAGTG[A/G]TT | | | | | |
| AGATACACTTACATAGATTAATTAT_NODE_1_length_618_cov_ | | TTACCTGATAACCATATAAAACAAACTTATATTAACTCATAA | | | | | |
| 152.051773 | | TTAATCTATGTAAGTGTATCTAAAGTCTAAATCGTT | | | | | |
| RAD_kmer_0000748_1_TGCAGGGGCGTATGCTATGCATGGT | 563 | TCCTGATCACTTCAACCTTCGGTGCCAGTGATTTTACCTGATA | Y | T | C | C | GYSNP0234 |
| TTTCGCATGAATTTGGTTGAGTTATGAACGATTTAGACTTT | | ACCATATAAAACAAACTTATATTAACTCATAATTAAT[C/T]TA | | | | | |
| AGATACACTTACATAGATTAATTAT_NODE_1_length_618_cov_ | | TGTAAGTGTATCTAAAGTCTAAATCGTTCATAACTCAACCAA | | | | | |
| 152.051773 | | ATTCATGCGAAAACCATGCATAGCATACGCCCCTGC | | | | | |
| RAD_kmer_0000749_1_TGCAGGTAATAAATGAGAAATGGA | 223 | CTTGGCTTACTCTTAAAATTGTTGAATGGTGAGCTGGCATGGT | G | T | G | — | GYSNP0235 |
| AAACAAGTGGCTATGACACCGTATTTATTTAATTTTTCTGT | | CTACACGTCGGGAAGTTCTAAAGGTATGTTATTAAGT[G/T]CT | | | | | |
| ATAAATCTTACAGTTGAAAAATAATC_NODE_1_length_513_ | | TTCTCTGGCCTTTTGGGTAAATAGGTTTATTCTAAGACTTTCT | | | | | |
| cov_139.072128 | | GGAAGTGATGAATAGGTTCTTGGCATAATGGGTGC | | | | | |
| RAD_kmer_0000749_1_TGCAGGTAATAAATGAGAAATGGA | 437 | GTGATGGTACTCGCGCGGCCAGTGATGCGGGCCCACACATTC | G | G | K | — | GYSNP0236 |
| AAACAAGTGGCTATGACACCGTATTTATTTAATTTTTCTGT | | AGTCCAGCGATGAGTTGATGGATCTTTGGCCATCATTT[G/T]C | | | | | |
| ATAAATCTTACAGTTGAAAAATAATC_NODE_1_length_513_ | | GACATCGGAAGATTATTTTTCAACTGTAAGATTTATACAGAA | | | | | |
| cov_139.072128 | | AAATTAAATAAATACGGTGTCATAGCCACTTGTTTTC | | | | | |
| RAD_kmer_0000750_1_TGCAGGCTTTGTATATCTGGAACTT | 192 | TGTAATACCTGATTCAACCTGGTACTTTACCCGTCCAGTTGAC | T | T | C | Y | GYSNP0237 |
| GTTATGTGAAGGAGCATATGTATATGCATGTGGTGATGCT | | AAAAATATTAACGTCGTAATGTCAGCACTACATCAAA[C/T]CA | | | | | |
| AAAGGCATAGCCATAGATGTACATCG_NODE_1_length_623_ | | TATTGGCAACAAAAATCATCTTGCTTCAATAAATATAAAAAT | | | | | |
| cov_100.709473 | | ATTAATGAATGCCATAACACGACTTTCAAACAGAAG | | | | | |
| RAD_kmer_0000752_1_TGCAGGCAAGAAGGACAAAACTCA | 433 | AAGTTATTATGTGTGAAAAAAGTCAGCTTATCATTAATTCTAT | G | A | R | G | GYSNP0238 |
| AAGTGAAATTGTGGCAAACTTGCATAATAATAGTTGATAA | | TAAAATTGTGGCACTAATTTGAACTCCTCTCAAGTGA[A/G]AC | | | | | |
| TACAAACCAGACGGTGCAAAGACAAAT_NODE_1_length_632_ | | TCACATGTCAGACCCCACTATGAATGTTTTTCAATGTGATCTG | | | | | |
| cov_83.754745 | | AAGCCTTATTGTGTATTACAGTGTCTAAAAATGTT | | | | | |
| RAD_kmer_0000759_1_TGCAGGCAGCCCCATTCCACTACTA | 235 | CATTATATATAGTATAGATATAGGATTGTAATATATAATTTTG | — | G | G | T | GYSNP0239 |
| TGGAGTGCATCTCCTCCGTCTTTCGTTGCGATGATACCCGT | | CATTATGTTATATATTTTAAGGCAACATAATACAAGT[G/T]AA | | | | | |
| CACTTTGATGGCCGTTACCTTGGCT_NODE_1_length_601_cov_ | | ATATAAGTAAGAAAAGAAAAATAAAAAGAGTATATATTTTTA | | | | | |
| 108.088188 | | ACTCCTCTTCGTAGTATATATGAAATTAAAAAGCTA | | | | | |
| RAD_kmer_0000765_1_TGCAGGTTTACTATAAAGCAACTAA | 307 | AACGAAGAAGTGGAATCATTTGCTAGATGTTTAAGGGTGTGT | A | G | A | R | GYSNP0240 |
| CTTGCCCACATCTTCCTGCGTCGTCTTTTTGGTGGAAGCGG | | AAATTAGTTGGTTTAGATATTAATCAAGATTACTTTCC[A/G]C | | | | | |
| CACCCGTAGGGCCGAAGGATCCACG_NODE_2_length_457_ | | ATCGGGTTTGCAGGCAATTTGGGTATGCCCAAGATATTCCAG | | | | | |
| cov_68.757111 | | CAGATATCATACTTGTTGACGACAATGAAGATGCTTG | | | | | |
| RAD_kmer_0000765_1_TGCAGGTTTACTATAAAGCAACTAA | 358 | GGTTTAGATATTAATCAAGATTACTTTCCACATCGGGTTTGCA | C | T | C | T | GYSNP0241 |
| CTTGCCCACATCTTCGTGCGTCGTCTTTTTGGTGGAAGCGG | | GGCAATTTGGGTATGCCCAAGATATTCCAGCAGATAT[C/T]AT | | | | | |
| GACCCGTAGGGCCGAAGGATCCACG_NODE_2_length_457_ | | ACTTGTTGACGACAATGAAGATGCTTGGGTTGACTATTCTAC | | | | | |
| cov_68.757111 | | ACCGCTGTTGAATCTAGAGGTATACATTCCACCAAT | | | | | |
| RAD_kmer_0000768_1_TGCAGGATGACAAAAGACGTTATTC | 182 | TATAGCAATGATATGCACTTTTACGTTCGCTATCAGTTCATAA | — | G | G | K | GYSNP0242 |
| AAATTACAAAATTAAATTCAGGAAAAAATAATTAACACC | | TCTGGATCCTTTTCCTCTACAGCTGTCAAGCAAAACT[G/T]TA | | | | | |
| GAAGAACTACCTTAATTGACAACCTTA_NODE_1_length_546_ | | AAAGGCAAGAAGGGTATGGTGTATTAACAGTTCTCATATTTC | | | | | |
| cov_81.430405 | | TGCTTCTATCTTTCTACCTGTGGCTTGACATGGGGC | | | | | |
| RAD_kmer_0000768_1_TGCAGGATGACAAAAGACGTTATTC | 338 | GGGGCACGGGGAGATGATTACACTAAAATGTGTTTTCTTTAA | C | Y | C | T | GYSNP0243 |
| AAATTACAAAATTAAATTCAGGAAAAAATAATTAACACC | | ATCTTTCTAATCAGTAATTGGAGAACTACCAGCAAATA[T/C]G | | | | | |
| GAAGAACTACCTTAATTGACAACCTTA_NODE_1_length_546_ | | CAGTCAGATGAACTGAATGATTCTGAAAAGTTGACCGAAAAA | | | | | |
| 6_cov_81.430405 | | GGATATAAGACTGTAAGCCAGCAGGAGTATATAAAAC | | | | | |
| RAD_kmer_0000771_1_TGCAGGCTTTGGTACAGAGCCGATT | 81 | AGTACGCGCTTAAGATAAATATAATCTGATTAATATTGAGAA | W | A | A | W | GYSNP0244 |
| AATGAATTAGTTACCGGAGATGGGGCCCGAGCACCATTTG | | ATTTTTAGAGTTAACGGTGCTAGATTTTCTATAATCTG[A/T]TG | | | | | |
| GCTGTGACTGCCCACAAGAATGGTCA_NODE_1_length_661_ | | AATTTGTAGGAAGGATCGTTCTAAAGCAGTTGACATTCTAGT | | | | | |
| cov_185.340393 | | GAAGGACTTGAAAGTGTTTTCTGCGTTTAATGAAGA | | | | | |
| RAD_kmer_0000772_1_TGCAGGTGGCAAAGAGGTTGTGGA | 235 | CATTCACAGTTGTATTTCCATCCATACAGCACATCATGACAAT | C | — | C | T | GYSNP0245 |
| ACTGGATGACATTTTCATTTTAGTGGCTCTATAAATTGAC | | CCCATTTTTAGAGGCCTAATTGGTGCATTTTTACAGC[C/T]GTA | | | | | |
| GGGCTATGTGACATTGTTCTTTGCGAC_NODE_1_length_550_ | | AACCACTGCTTAACAGTCTTATTTTACAACCATATAATGCTAT | | | | | |
| cov_113.096367 | | ATATTCCAGCCATAATTCTCTACATAACAGCCCA | | | | | |
| RAD_kmer_0000775_1_TGCAGGTTGATGGCTTGTTTCGAAG | 539 | AATCTTATTGTACATCTGTTCGTCACAAACAAATATGTAATGT | A | G | R | A | GYSNP0246 |
| CAATCTACCAGGGATTTTCGCAGTTGGTGATGTGGCAGCA | | TAATCTAAATGCCAAGAATGTAAGGTGGTAGTTGACA[G/A]G | | | | | |
| TTCCCATTAAAAGTGTGTTTTCTCTA_NODE_1_length_609_cov_ | | TTTCTAGAGAAAACACACTTTTAATGGGAATGCTGCCACATC | | | | | |
| 145.267654 | | ACCAAGTGCGAAAATCCCTGGTAGATTGCTTCGAAAC | | | | | |
| RAD_kmer_0000776_1_TGCAGGAGATATTAATCCCACAAGT | 100 | ATAACATAATTCTAAAACTTTAAGTTGTTGTAGGTTTATTGCG | A | W | A | T | GYSNP0247 |
| AAATTGTTTTTTTTATTCTATATTTTATATTTACTTTTATTA | | AGCTATGGTTTTTTATACGGCAAGAAAAGCAAATATT[A/T]TT | | | | | |
| TATTTATAATTTAATCCGGTTTTT_NODE_1_length_501_cov_ | | GAAAAGAAAATGATTAAAGGTAGGTATATGTAATACAATGA | | | | | |
| 100319359 | | GTTGACGTCAACTCGCGGATTGCGACGAGATATCAAT | | | | | |
| RAD_kmer_0000777_1_TGCAGGAGGTGTGGATCTTAATGTT | 469 | ATATAGTGTGGAGAAAAAAGATCAGGCTTGAGAGGTTCATTC | G | A | G | A | GYSNP0248 |
| CCTTATTTCGAGTATGAACCTTTTCCCGCTCCAGTTAATCT | | AAAGATCCACTGCTGAGGTCATCCTTCTTCTCGGAGCC[G/A]A | | | | | |
| AACAAAGAGTGTTGGTGAAGGGTCT_NODE_1_length_584_ | | ACTCTTTCTTAATCTCAACACCACCAGTAGTGTTCTTGCCTTT | | | | | |
| cov_151.921234 | | GCCAGTAGACCCTTCACCAACACTCTTTGTTAGATT | | | | | |
| RAD_kmer_0000786_1_TGCAGGTTGTCGTAGATCCCATTGG | 188 | CCATGTAATTCGTGAGGAAAGTCATAAATGCAAAAAAGAAA | T | — | T | K | GYSNP0249 |
| TGTGTCCATATGGCAGATGGCTGCTCAACCTTCAAGTAGG | | ATGGCTCATACCCGTCACTACTGCCTGAGTATATTCTTT[T/G]G | | | | | |
| AAGCAGTTCAATCCTGAACCAGATTT_NODE_1_length_594_ | | CCATCTGTACTCCAAGTGACACTTAATATACGACCTGCATAG | | | | | |
| cov_188.796295 | | ATATGATGAATGCACAAATGTATTAATGACAGATATA | | | | | |
| RAD_kmer_0000790_1_TGCAGGGATAGGGAAGACCGCGAT | 91 | GAGGGATTCTGTATCACATATCTTAATCCCCATTCCCATTCTT | T | C | T | T | GYSNP0250 |
| TGCAAAGGCTGCATATGAACGCCTTGCGATACTTTTCAAA | | CAACACTTTGATAGTGTTTCATGTGCACAGCCAGTTC[T/C]TTC | | | | | |
| GCCCGGTATAGCTGTTTTCTTTCAGAA_NODE_1_length_599_ | | AGAACACCAGGACACCCTGCCCCCCAACACACTGCTTTCCTC | | | | | |
| cov_144.263779 | | GACACATCCTCGTACCCTTCTTTCGGGTGGTCTTG | | | | | |
| RAD_kmer_0000794_1_TGCAGGTAAATAGTGTATACTGTAT | 137 | TCTCTTATCACAAGTTCTCAGTAAGGCATTGCCCTTAGGTGGA | C | — | M | Y | GYSNP0251 |
| TACAAGATAAGCAAACACAAAATATAAGATTAATGTTCA | | ATAGTTGTCTAGTGGCTAATCGCTCTCATTTTTTGTC[A/T,C]TT | | | | | |
| AAGAATGTAAAGTGTTTACCACACCAT_NODE_3_length_235_ | | ACAAAAAATAAATGGTTTTCTACATTTCATTATGGTGTGGTA | | | | | |
| cov_269.051056 | | AACACTTTACATTCTTTGAACATTAATCTTATATTT | | | | | |
| RAD_kmer_0000800_1_TGCAGGCTCCAAACACCGCCAACGC | 440 | ATATGGAAGTTCCTTCAGTTAAGATAATATTACATTTCTTCTA | G | A | A | R | GYSNP0252 |
| AATGCCATGGCAGACTGGAATTGTATGTGCATTAAAATGT | | CGCTGAATTAAAAAATAAAGTAATAACTTTTCTCTCT[A/G]TT | | | | | |
| TGTTTACCAAACCATTTCATGGCCTT_NODE_1_length_547_ | | GCATGGAATGAACACTGATTTTGATGTAACAGGGATGTGTCAA | | | | | |
| cov_86.965263 | | GGCCATGAAATGGTTTGGTAAACAACATTTTAATGC | | | | | |
| RAD_kmer_0000802_1_TGCAGGCAATAATCCTATATGTACA | 141 | TTAGTTTGCTCCGTAAACATGTTTTGGATGGCTTAGTGTTATA | T | T | G | — | GYSNP0253 |
| AATATTTAATGTTATGATTCATACCTGCAATAATCCTATAT | | TCGATGCAGGGTTGCAGTTATAACATTACTTAATTTG[G/T]TA | | | | | |
| GTACAAATATTTAACGGTCAGATCT_NODE_2_length_523_cov_ | | ATAAGATTGTTAATACACAGTAATCAGGGCTTTTATATTGACT | | | | | |
| 70.235184 | | TAATTCATAAACTAATAATTTTAATTCTCTTTTCA | | | | | |
| RAD_kmer_0000805_1_TGCAGGAATGTTTTGGAGGCCCACA | 330 | CAACATGTTAAGAGATAAAATGTACCCCAAATTGACCCGCAC | Y | C | Y | C | GYSNP0254 |
| AGCTCGAGAATTGCAGTCTCTAAATCTGAAATTCCATGAC | | CCATATATGGGTCGAAATTTAAAATCATCACTTGTACG[C/T]T | | | | | |
| CCGTAATGGCACACGTGTAAATATGC_NODE_1_length_617_ | | GTGAACCAAGTTTTTCTCTAGAAAAACAGTTTAGCTTGTTGAC | | | | | |
| cov_134.953003 | | TGTTAAAAAACAAACAATCTTGCACCAAATTAACAC | | | | | |
| RAD_kmer_0000808_1_TGCAGGAAGCACGGGTCAAAACCA | 284 | AAGCAATATCTGGAAAAGATGAATCTTGATATACACAAAATG | — | R | A | A | GYSNP0255 |
| CTAGTTAGATTAAAAATAATGATCATTTTAAATACTA | | CATACCAATTTCTCCATCTTTCACAAATTCAAATCCTC[A/G]A | | | | | |
| TTATATGGTTAAAGCTAACGTTTAGGT_NODE_1_length_571_ | | AGAGCATTGATGAGACAACTCCATGATTCAAAAACCGGAAG | | | | | |
| cov_70.455345 | | AAATCATTGATAACTCATTGAAGGAGGGGCAAATTGGG | | | | | |
| RAD_kmer_0000816_1_TGCAGGATCATATTAATATAGTTAT | 132 | AAAATGATCAGTGTAACGCACAAAACGCATGATATTTTTTCTA | C | A | C | C | GYSNP0256 |
| TACATAATCTATTGCTTTGGAAATTTCGGCTGTTTTATTCC | | AACTGCCTGGTTTACATCCTTGAGGGATACGGTCAAAA[C/A]A | | | | | |
| TCAAATATATCTACTATCCCTTCTT_NODE_2_length_395_cov_ | | TGTAATCTTTTATATTGGTCTGGTTTGGATGGGTTGAGCCGAA | | | | | |
| 82.205063 | | ACATTTTTGCCAAAAAAAAACTTTAGGACACACTGG | | | | | |
| RAD_kmer_0000823_1_TGCAGGTTCTTTAATCTCTTTTTCTT | 150 | TGTCAGCATGTGTGTGTTACACCAATCATTGTTGACTTTAGTT | Y | Y | T | Y | GYSNP0257 |
| GTGGCAACGATTAATGCATACCATTGCTAAGGGTCATAAG | | TCAGTTTCACTAGAAAAATACAGGGAACGTAAACAGT[T/C]C | | | | | |
| ATGGGCGGGCTGCGTAATGGGTTTA_NODE_1_length_322_cov_ | | AAAGACACTATATTGGAGAACTCTAAAATTAGTAAATCTAAA | | | | | |
| 22.866459 | | ATAAAAATGTAAGGTTAGAAGTGGAAATTAGATTTTG | | | | | |
| RAD_kmer_0000832_1_TGCAGGGCCAATTCTCCGGTTGCAG | 227 | TCTTCATAGGCTCTCGTGTGTGTTCATTGATCATTAGAGATGC | M | M | A | A | GYSNP0258 |
| TGAGGTTCAATGTTGCACCATAGCTAACGAGATGGTCCCG | | GGCCACCATGGATCTGTTACTGCATTGCTTTGTTTCT[A/C]ATC | | | | | |
| GTTTGCTGACCACACCACTCGAGGGA_NODE_2_length_312_ | | TCAACAACTGCCCAGCAACAGCCTTTCAATTACCCTACTGCA | | | | | |
| cov_44.653847 | | AATCTTTCCACCATATGGGCCAATACTGAATCTTT | | | | | |
| RAD_kmer_0000838_1_TGCAGGTTGGGTATTTAGTGACATC | 499 | AAATTAAGATCATCTGATTTAACCTCACAAGTATACTTCTACA | G | R | R | G | GYSNP0259 |
| TTGCTTGCTCAATGAGAATCATGATTTTTTAAGATTAGCA | | TCCATACCAATGTTAATGCCAAGCACTGAAACGTTTC[G/A]TT | | | | | |
| ATTAATACAGTTCGCAATGATATTAT_NODE_1_length_573_ | | GCGGCCAATAATATCATTGCGAACTGTATTAATTGCTAATCTT | | | | | |
| cov_154.664917 | | AAAAAATCATGATTCTCATTGAGCAAGCAAGATGT | | | | | |
| RAD_kmer_0000843_1_TGCAGGTGGCTTTTTACTTTGACCC | 427 | AAACATATAGGGTCGGGTTGCTAGAAACACTTTTAGTACAAA | — | C | G | C | GYSNP0260 |
| ATTGATTTTAGTTCTAAATAATAGTAATTTCTTGATTATCT | | ATATTAAAGCTTTCTTATAAATGATTAGTGTCAAATAT[G/C]A | | | | | |
| TGATTCCAAGAAAACCTTCTTCTA_NODE_1_length_547_cov_ | | TTACAAGAACTACAATGTTTGACTAATAATCTATATTTTATAA | | | | | |
| 93.914078 | | AGCAACAGATTTAGAAGAAGGTTTTTGTTGGAATCA | | | | | |
| RAD_kmer_0000853_1_TGCAGGGATGGCAAAAATAACAAA | 113 | TCATAGCATAAAAACTACAAATATATAACCTAAAAGGAAAGT | C | C | C | T | GYSNP0261 |
| AAGTGTTTGGAATAAGCAAACCGAAAACATTAGGGCGTT | | TCATTTTCGCATAATGAAATTGTTAGAATGAATTATTA[C/T]T | | | | | |
| AATCAAGTATGAGACTGGATATAATATT_NODE_1_length_343_ | | AGAAAAATGTTTATTACTAGAAAAATGTTAAGAAAAAATAAC | | | | | |
| cov_113.314865 | | AATACTATTTGAAAAGTTTTGTATTTGCTTCGGGTAC | | | | | |
| RAD_kmer_0000853_1_TGCAGGGATGGCAAAAATAACAAA | 218 | AATGTTAAGAAAAAATAACAATACTATTTGAAAACTTTTGTA | G | A | A | — | GYSNP0262 |
| AAGTGTTTGGAATAAGCAAACCGAAAACATTAGGGCGTT | | TTTGCTTCGGGTACTCATGGTATATGATTTCAGGTAAT[A/G]G | | | | | |
| AATCAAGTATGAGACTGGATATAATATT_NODE_1_length_343_ | | TATTTTGTGTCACCTAATAGCATAACCAAAGTTGTACAAGAG | | | | | |
| cov_113.314865 | | CCCGTTTTTTCTTTATCAATATTATATCCAGTCTCAT | | | | | |
| RAD_kmer_0000864_1_TGCAGGATCAAACTTTGGAGTGCAA | 356 | AATACTAATCTACTTTTTCAACTTTCTAGAATAAAATGATTTA | — | T | C | C | GYSNP0263 |
| TTTAAGACGATATCTGTGTTTCCTGCATGGTTTTAGTCATG | | GGAGACCTAGTGCATTAAAAATACACCGAGTGACTTT[C/T]GA | | | | | |
| AAATTTAATAATGAGAACACATATA_NODE_2_length_603_cov_ | | CATTAAATTATTTGACCGTTTTTAGCTACTTCTCTTTTTTATAT | | | | | |
| 81.872307 | | CACATGTTTGACCCATTAGAGATACACCTAACCC | | | | | |
| RAD_kmer_0000864_1_TGCAGGATCAAACTTTGGAGTGCAA | 454 | CCGTTTTTAGCTACTTCTCTTTTTTATATCACATGTTTGACCCA | G | A | G | G | GYSNP0264 |
| TTTAAGACGATATCTGTGTTTCCTGCATGGTTTTAGTCATG | | TTAGAGATACACCTAACCCGAACTGACCCTTTGGTT[G/A]GTA | | | | | |
| AAATTTAATAATGAGAACACATATA_NODE_2_length_603_cov_ | | AATAGGCTCTGTAGTTTACAAATTTTTGAAGGTAATATTAATA | | | | | |
| 81.872307 | | AAGCTGATATATAAGTGTGCGTAACCAAAGTTAT | | | | | |
| RAD_kmer_0000865_1_TGCAGGACTACGGTCAGCCGCTGCG | 526 | GCTTCGCTCGATCAGAAATCCAAACGTAAACCAACTAATCCA | C | T | C | — | GYSNP0265 |
| CTGTTAATTAGTTAGTTAAATTTCCTTCACTGTAGCGGTTG | | TATTTTGCTTGATTTTGCCATCCATATTCCATAGTTTT[C/T]AA | | | | | |
| TGTCGCCGCATTGCATGCCTCTCGC_NODE_1_length_612_cov_ | | TGACACATCCCGTAATCCTGCGAGAGGCATGCAATGCGGCGA | | | | | |
| 74.060455 | | CACAACCGCTACAGTGAAGGAAATTTAACTAACTAA | | | | | |
| RAD_kmer_0000866_1_TGCAGGACAGCTGGCGAAAGACAT | 89 | CTCAACATATTTGGTTGTTTATATAAGGTCGTTGAATTTATTA | W | W | W | T | GYSNP0266 |
| TGAGAAATTATCTGATGACGCTGCAGCTAATTTTGGTTTT | | AACAAGTCCTTGTAAATTTATAAGTTCAAGTACTTGA[A/T]CA | | | | | |
| ATACATCTCAAAAAGATTCTTCCTGAT_NODE_1_length_443_ | | TGCAAAAAACGACACTCTTGTTATACATAGAATCAGAATTTT | | | | | |
| cov_38.291195 | | GTAATTGAGTTTTTATGAGTTCGGAAGTCACATAAA | | | | | |
| RAD_kmer_0000866_1_TGCAGGACAGCTGGCGAAAGACAT | 332 | TTTAGATTATATTGAGATTATAACTTTTAATCAAATTAACGCA | K | G | K | T | GYSNP0267 |
| TGAGAAATTATCTGATGACGCTGCAGCTAATTTTGCTTTT | | ATTATTTATGTTAAAAAGATGAACAAGAAGTTTTTAT[G/T]AT | | | | | |
| ATACATCTCAAAAAGATTCTTCCTGAT_NODE_1_length_443_ | | TCCCTGCCAGCTTTGACATGTACTTAAAAGAACATGTTTCAA | | | | | |
| cov_38.291195 | | GCCAAACCCGTTTTATCCCGTTACCCAATCTGCGGG | | | | | |
| RAD_kmer_0000873_1_TGCAGGAACCACAAGTGCATTTGTT | 319 | CATTGCAGGGTTTCTACTCCATTCAGCAACACACGTGACTTTG | A | R | G | A | GYSNP0268 |
| GATTGTAATACTTCTTCGGAAACTGCACTACTTTTCATCTG | | TACTCTGGTTATGGACCTCACATAATGAAGTCAACAC[G/A]AG | | | | | |
| AATGTTTTGCTTGTCTTTCTCCTTG_NODE_1_length_581_cov_ | | ACTAAGGAAAACCGAAGAATCTCTCAAAACCGGTGACCCCA | | | | | |
| 83.356285 | | AGTTCCCGAAAACAATCTGGCGAATGAAACACCTCTG | | | | | |
| RAD_kmer_0000875_1_TGCAGGAGATGAGCAGATGGGGTA | 139 | CACGCATCCGAGACAGAAAAGGGAAGGCTCAGAAGTAGAAA | Y | S | Y | Y | GYSNP0269 |
| GAAAGGAGATGAAGTTAAGAGGCTAACTTGTTACTCTTTT | | AACTAAAAAATATATAACATACGTAAAATATATTAAAAA[T/C, | | | | | |
| ACGTGTCAAGGGCTGATGGGATGCAAC_NODE_5_length_222_ | | G]ATAATTCTAATTCTAATAATAAATATATGATAATCTAACTA | | | | | |
| cov_70914413 | | TGAAGAATTTCAATTTCAAGAATTAATTATTCTTATACT | | | | | |
| RAD_kmer_0000876_1_TGCAGGCTAGAAATGTAATTATCAA | 361 | CCTCTCACCACCTTGCCATCGCCGTCATCCCCACCACTTCCGC | C | C | Y | — | GYSNP0270 |
| GTACAAAGGTTTCTCAAACCAATCATTTTGGAGAAATTGC | | CGTCGCTGCTGTTCCTCCCCGTCCCTCTCTGTCCCGT[T/C]GCT | | | | | |
| TACCAAACTTAAATGCAACACTAGAA_NODE_1_length_597_ | | GCTGTTGCTCGCCGTCAGTCCCCACACCCGTCGCGTGCCTTCC | | | | | |
| cov_91.432159 | | ACCTCTCCCACAACCCATCTTCTTCAACCTCCCC | | | | | |
| RAD_kmer_0000877_1_TGCAGGAAGCGTAAATTCATCTATG | 339 | TGGGAGCAGCCCAACAGGCTTCCGGAGGAGAAGCTGGAGGA | G | — | A | G | GYSNP0271 |
| CAACTTACTCTGAAGCCTAGAGCTGTAAGGGCAGAATCAT | | GTGGTGGCATGAGAAGAAGCCGTAGAACCTCGATTGACT[A/G] | | | | | |
| CGTTACGGCCTACCAGAAAGACAGAA_NODE_1_length_477_ | | GTGGATGCCGGTGAGACAATTCTTTCCCTCCAACCAGAGACC | | | | | |
| cov_96.798744 | | CTGTATGTCCAACAGACGGCCGTACAGAAGATTCTGTC | | | | | |
| RAD_kmer_0000885_1_TGCAGGCTGATAAATGTTCCTACTC | 333 | ATTAAAAATTCAGAAAGTGACAAGATTCTAAATAATAGTAAA | A | — | A | R | GYSNP0272 |
| TTTTCCTGACTGAAACTTTTATAAATGACAAATTAGTAGG | | TTACAAATGTTTGAACTGGTATACAGCAATAAAATTAT[A/G]T | | | | | |
| CCAAATGCTTTCCACAGAAAGAACAA_NODE_1_length_449_ | | TGTCCTTTCATGGTCTGTGGTACTGGCCTTGTTTTTACCCATG | | | | | |
| cov_151.808456 | | CGAATTTTTGTTCTTTCTGTGGAAAGCATTTGGCCT | | | | | |
| RAD_kmer_0000886_1_TGCAGGGGATAAAAAATTACTGGG | 98 | CTAAAAACGCTTACAAAATCTCAATCAAGAAGTAAAGAAAA | Y | Y | T | C | GYSNP0273 |
| AGCAGCCTGTTGAGGTCAGTGATTCTTTCCTATGAATTAT | | AAGGTAAACTAAGGGGAACACATGTTTGTGTTGTATCTG[T/C] | | | | | |
| AATTGGACAAAACTATCATTCTATGAT_NODE_1_length_468_ | | TAATGTGTGTATCTACCTCCTTTGTTGTTTGCATAAAACACGT | | | | | |
| cov_172.331192 | | CAAAGTTTAAGTACGGTGAAAAAGAAGTCGATAAATC | | | | | |
| RAD_kmer_0000886_1_TGCAGGGGATAAAAAATTACTGGG | 204 | TGTTTGCATAAAAGACGTCAAAGTTTAAGTACGGTGAAAAAG | R | A | R | A | GYSNP0274 |
| AGCAGCCTGTTGAGGTCAGTGATTCTTTCCTATGAATTAT | | AAGTCGATAAATCCAAGTTATATGTAAAGAGAAAGGGT[A/G] | | | | | |
| AATTGGACAAAACTATCATTCTATGAT_NODE_1_length_468_ | | GTCGAATCATTTCCGGCTAGAAAGATAGATCCCGGAAATAAT | | | | | |
| cov_172.331192 | | GGCCACCCCTGCCACCGCCACTCCAACTGTCGACAAAA | | | | | |
| RAD_kmer_0000889_1_TGCAGGACTAGCATCCCTTGGTGGA | 499 | TGCTCCAAAAATTCATCTTAGTTTATTATGAAATGTTTTCTTG | R | R | R | R | GYSNP0275 |
| TGTTGAGGGCTCAAGTGATGTTGACCGCTTGTCACCACTG | | ATTTGCTATTAATCTTTTTACCTATGTTATGCAGATG[G/A]CGC | | | | | |
| ACTCACAACTCGTGTCTGTGGTGACA_NODE_1_length_568_ | | TTGTCACCACAGACACGAGTTGTGAGTCAGTGGTGACAAGCG | | | | | |
| cov_144.028168 | | GTCAACATCACTTGAGCCCTCAACATCCACCAAGG | | | | | |
| RAD_kmer_0000890_1_TGCAGGAGTACCCTAGTGATGCGCC | 299 | CAGCTTTATTCTCCGACAAATATATGTGTGTGAATAATATATA | R | A | G | A | GYSNP0276 |
| TCCTAGTCTCCTACTCTAATTCAGCTACCACAATATAAGC | | TTCATTAAAAGAAAACATAATGATCGTACTGTTTACC[G/A]CA | | | | | |
| CTCATAAGCGTTATTTATATAAAATT_NODE_1_length_576_ | | GAGACTGAAGTAGGTTAAGTGAATAAAAAGTAAAAAATGAT | | | | | |
| cov_102.322914 | | GCTAACAACGTTGGTTCCCCGCTTTCGTGGCTTCCAG | | | | | |
| RAD_kmer_0000893_1_TGCAGGGTACACTGTAGAGTTTATG | 368 | CATACGACCACAGATACTACGAAAAAGTACAATCAAACCACT | R | G | R | G | GYSNP0277 |
| TTCACTTCTTTAGCTGGTTGAGGTGATGGTTTCATGTTCAA | | TTTCACATGTCTGCACCGCACCAATAGAGTCAGAAAAC[G/A] | | | | | |
| CACTCCTGTTAAATGATGGCTTATA_NODE_1_length_456_cov_ | | AGCTTTCGGTTTTAACAGGTGCATGTTTACAAGTTAAGGGCC | | | | | |
| 42.230263 | | ATGGGTTCAAAAAGGTCCTCTTCTTACGCCTTCGGTTC | | | | | |
| RAD_kmer_0000895_1_TGCAGGTAAAGAGTTAGTGAAGGTT | 158 | ATTATTATAGTTACTAAATTTGTTAATTATAAAGTTGAAAATA | T | W | A | — | GYSNP0278 |
| TCCTTTAGCATAGATGCCAATGGCATTCTTCATGTCATGG | | CCCCATATGGCAAAGAAACTTAATAAGAATTATTTTA[A/T]TA | | | | | |
| CTGAGTTAGTATCAACGGGTAATAAG_NODE_1_length_587_ | | ATTATTATATACAGTTTATAATTTGACGGATATTACATTAATT | | | | | |
| cov_71.720612 | | CAGTAAAGAGGAGATAACAAAGTGAAGTTTCCTTT | | | | | |
| RAD_kmer_0000895_1_TGCAGGTAAAGAGTTAGTGAAGGTT | 268 | GGATATTACATTAATTCAGTAAAGAGGAGATAACAAAGTGA | A | A | A | G | GYSNP0279 |
| TCCTTTAGCATAGATGCCAATGGCATTCTTCATGTCATGG | | AGTTTCCTTTTGTATGACCAGAAAGGACCTACGAAAGAT[A/G] | | | | | |
| CTGAGTTAGTATCAACGGGTAATAAG_NODE_1_length_587 | | CAAGAAACTGCTTATAGATAACATACATATCTCATAAAAGAC | | | | | |
| cov_71.720612 | | TGTCAAATATCACATACATAAAAGCAACACATGCTAGA | | | | | |
| RAD_kmer_0000896_1_TGCAGGTTGCAGCCAAACGGCTTGT | 360 | AAGCCAGAAAATATATGAAGGGGTGAAATATATAATTTAACT | A | A | W | T | GYSNP0280 |
| AATGTTTTGAGGTACATTTATCAGCAGAAACTATGAACCT | | GTAGTTTTCTTTTTGGGTCCCTGTTGAAGGGATTGGGG[A/T]A | | | | | |
| TCACTGTTGCAATTATGGATTATGAG_NODE_1_length_624_ | | TGAATTGTGGTGCTCCACTTTTATTCATTTTCTCATGCCTAAA | | | | | |
| cov_149.326920 | | ACCCTGTTATTTAAAAGGATTAATGTTAGTATTATC | | | | | |
| RAD_kmer_0000898_1_TGCAGGCGCTTCGTGGCAAAGAAG | 379 | CAAGACGACTCGCCACCTTGTTTAATTAAACTGGTCAACCCA | G | G | G | A | GYSNP0281 |
| ACGTTTCAGGTGGGCCCTTTTCATGTTTTATTGTTCTACAA | | CCAACCCTTTAACCCATTAATTACAACCCACCAACCCC[G/A]A | | | | | |
| CCCATATATTTATTCGTGTAAAGATC_NODE_1_length_556_ | | TTATCACGTTTAAAACATGATCACTACCCATCAATCCGTTTGA | | | | | |
| cov_124.215828 | | CACATTTACATAAACCGGTTCGATCATGTTCGGGTT | | | | | |
| RAD_kmer_0000901_1_TGCAGGTCAACCGGTTTTGTCCCAT | 301 | AACATAAACTGTATGATCAACAGTGAACCTAATAAGTCCCAG | W | W | A | W | GYSNP0282 |
| ACAGATAGTTACCCCTTTCGACCCATAATCAACCGTCCAT | | CTATATGCTGTGTTTTTGTTCATAATTTGCAAGTCTTA[A/T]GT | | | | | |
| TTTAGAACCTTTAATATTATGCGTCA_NODE_1_length_584_ | | TCTGTTTATTGTTTCCAGAATCTTTCAGCAATTACTTCAGCAA | | | | | |
| cov_173.765411 | | CTACGGAGAAATAACAGATTCTGTTATAATGATGG | | | | | |
| RAD_kmer_0000902_1_TGCAGGGTCCACTCTAAATTATGAT | 246 | GAACCAGCTCCATGAACCCACATTGCCGAGTTCTCATTCTGG | A | G | A | R | GYSNP0283 |
| GACGTGTTGAATGCCCATTACAAAGATAACAGTCAGTTGC | | GAAAAAAAAACCAAGATAAGACAAAAGGGACACGGCAC[A/G] | | | | | |
| TCTCACTTCAGCAGGTATCCTCTTTT_NODE_4_length_398_cov_ | | TACATGTTGAGCAAAGAGTCGAACAAGTGCATGCCAAAACA | | | | | |
| 24.077890 | | GGCAACTTTTGGTATGAAACGAGCTGAGTTGACACGACG | | | | | |
| RAD_kmer_0000909_1_TGCAGGGTTTTTCTCTCACCTTGATC | 117 | ACATGTCTATTTAAAAAAAAATACATATAAAAATGTCTGTAT | — | T | T | C | GYSNP0284 |
| TGGACAATGGTACTTGAAATCTGTACTGTTAGATTTTTTTT | | ATAAATATAAAACTGAAATTACATATAAAATCTCAATC[T/C]G | | | | | |
| TTTTGTTTATTGTTTCAAGAGTGT_NODE_1_length_462_cov_ | | ACTAATCCTGACTAATCCTTATTAATCCCAACTAGCGCTTAGC | | | | | |
| 96.309525 | | AATTCTTACAACACTGGCAGCAACCTTACCGTTGCT | | | | | |
| RAD_kmer_0000915_1_TGCAGGTGTTCTACAAAGTGCCTGA | 357 | TAAAGTCTTGGTTCAGAGTTTTCAGAACATGGCTGCAAGGCG | C | C | Y | Y | GYSNP0285 |
| TACCTAATTGAGTATTCTCATTGAGGTTATGTATTTTGATG | | GGTTGCAGATTAGGACCTGTCATCCACCGTCCCCGCCA[C/T]G | | | | | |
| CTTAATAACAACAGCTTTTTTGAAT_NODE_8_length_485_cov_ | | CCATCGTCATCAGTCGTCGGAAATGATTTGTATTAAATGTCAT | | | | | |
| 25.993814 | | ACATAATCACTTTTGGAATGGAAAAACGGTACTGGA | | | | | |
| RAD_kmer_0000917_1_TGCAGGCTTTGGATGTGGTAATGAA | 108 | TCTCCTTCCTCCTGTTTTCTGGTGGAAGAAGAGACAGATCTTT | R | G | R | G | GYSNP0286 |
| GGCGAATCTTTTCAGGGAAAAGATTTCGGTTGGGAGGGGT | | TAGCCTCCGGGCAGCTTGCGTACCCAACTGCTCCTTC[G/A]GA | | | | | |
| ATGTACCCACGAGTCCACAGAAGGGA_NODE_1_length_661 | | AACCTTCCATCTTCAGCCAAGACACAAAATTCCATAGGAACG | | | | | |
| cov_138.001511 | | TAGTTTGGCCTTTTTTCATTCCCCAATTGTAAACAA | | | | | |
| RAD_kmer_0000920_1_TGCAGGGCTTCTTGATAGGATTGGG | 355 | AATAACAATATTGTTTCCTATAGGCTATCGAAAATCCTGAAA | G | G | A | G | GYSNP0287 |
| CTTAGGGCCCAAGAAAAGTGAAAGTTTAGGACGATAGAG | | AGATGACACCTGCTATGAAGAAATTCATCGAGTATTCG[A/G] | | | | | |
| AAGCTCCCGGGTCCTATATATACATAG_NODE_1_length_509_ | | AGCTTGAATATCAAAGGTACGTACCTGCATGGAATGTTTATA | | | | | |
| cov_43.927307 | | TACACATTCTTTTATTTTTATGCTTATTTAATATTTTG | | | | | |
| RAD_kmer_0000922_1_TGCAGGGTGGTTTGAATAGGCTGAT | 207 | GTACATATTTATAAAAATTGTTTAATAGTTTATCATAACACAT | G | — | T | G | GYSNP0288 |
| TCTTGACATGGTAATATTGGCATCTTAATATTTTATTGTTG | | CTAAAATTTATTTTTCTAAACAGAAGGTTTAAAAATT[T/G]TA | | | | | |
| GATAGGACATTATAAAGCATGCTTT_NODE_1_length_614_cov_ | | GAGATATAGGGGTGCAAACTAAAAAACGAAGGCACTGATGA | | | | | |
| 72.239410 | | AACTCAGATATAGCTCATAGCTGCACCAAATAAAAGT | | | | | |
| RAD_kmer_0000926_1_TGCAGGCGAAGCCTCAGGGAACAC | 126 | CTTGTCGACTGGTAATCTGGTGCGTGTTCCAAACTTCTGCTTT | M | A | M | M | GYSNP0289 |
| GCATTCAACAATCAAGTCAGTATGTGTAACCATATTGTAT | | GTTATTTCTTATAATCCAAGATGAATCTACCCACATA[A/C]AT | | | | | |
| AAAATGCATGCATTAATCACACAAACA_NODE_1_length_593_ | | GTCGTTTTATCAGAATTTAACGATTGAAATGTCATCGAAATGT | | | | | |
| cov_143.209106 | | AAAATCCTTATTCACTTGACTGTTGATAGACACTT | | | | | |
| RAD_kmer_0000927_1_TGCAGGGTTTAGTTTGCACGATGAA | 229 | GGAGATCAAGCCCTTAGGTACTTGTTTCTTCAATTAATAAATA | T | T | G | — | GYSNP0290 |
| TAACGGCAAAAGTAGTAGTAGTGGACAAGCTGCTGATCT | | ATTTTTTTTAGTAAAAGTGTAACATTTGGGGAAAACT[G/T]AA | | | | | |
| GAGTAGCGAATTCGATGCGGATCTGGA_NODE_1_length_622_ | | GATATTTATATTTTTTATTAAGATTAAATATTAACTTCTTGAA | | | | | |
| 2_cov_73.172028 | | AACCAAAAATTTAGCTACTCAAATTTATATTTAAA | | | | | |
| RAD_kmer_0000929_1_TGCAGGTCGTCGTTGACTTCCAAAT | 89 | TTGGAGCATAGATGTTAATCATGCCCAACTTGTTACAAATAA | M | M | C | C | GYSNP0291 |
| CGCCGATTCTGTCCAGTTTCAGAACAACTGTGAGTGATGT | | AACTAAGACACATGGCGACCGCTCCTCCTAAACTAGAA[C/A] | | | | | |
| GATTACTTCTGCTTAGTCTGCCACTG_NODE_1_length_454_ | | ATTGTTGATCATGTTGCATCATTAATTGCTGTAGTGTCATTGG | | | | | |
| cov_51.484581 | | ACTTTAATACTTGGGCATTTCACCCAATGATAAACTC | | | | | |
| RAD_kmer_0000931_1_TGCAGGTAATTTGATGTGTCAAAAC | 161 | TTTTTTACTACCTTAACTATTATTTTTACTACACCATATTTTTC | Y | Y | T | Y | GYSNP0292 |
| TAAAGAAAACTAAAGAGGAGCTAACATCCATTAGAAACT | | ATGTTACTTGGTGTTAATAAGTATATATTTGCATAG[T/C]CAT | | | | | |
| AAAAAAATGCAGATAACTTTTATTTTA_NODE_1_length_459_ | | GAGCTGAGAGAAGGGCAAGAAAGTGAAAAGAAAACAATTGG | | | | | |
| cov_129.755997 | | ATTCCTAGAGGTATCGTATATTTGTATTACCTAAAA | | | | | |
| RAD_kmer_0000932_1_TGCAGGTGGTTGTATTCCATTCAAA | 223 | TTTTTTTTTTTTTTTTCATTTTTAGTCAGGTGTGAATGGCTCAA | — | C | M | C | GYSNP0293 |
| GGACCATTAAATCCCGAATTCCTTGATGTATATGCCCCAG | | CAGCAACTTTTCCAGATGCAACTGGAAGAGCTTTTA[C/A]AAC | | | | | |
| GCATGCTGGGAACGTTAAAGTTGCCA_NODE_1_length_338_ | | ATTTTCTTCTCAGTTAGGTTCCTCTGCTGCGGATATGAACCAC | | | | | |
| cov_74.789940 | | AATGATGCAATAGGTGTGTGCTTCAGTTTTCTGC | | | | | |
| RAD_kmer_0000934_1_TGCAGGCAATAATCCTATATGTACA | 242 | TCTTCGTACACAATGCAAATTTCGTAAACATCTGCTTTGGGGA | — | A | G | G | GYSNP0294 |
| AATATTTAATGTTATGATTCATACCTGCAAGAGCTGGTTA | | TGTTGTGTATTTTGGACGATGGGAAACTACTTATGTT[G/A]CT | | | | | |
| TCAAATACATTACCAATTGTCATCTT_NODE_1_length_563_ | | TCCGTTTAACCAACAACTTGTCATATACGACATGATCAAAGA | | | | | |
| cov_79.428062 | | TTCATTTACGGAGGTAAAGACCTTGACGAGTTTTGT | | | | | |
| RAD_kmer_0000934_1_TGCAGGCAATAATCCTATATGTACA | 344 | GTCATATACGACATGATCAAAGATTCATTTACGGAGGTAAAG | — | A | G | A | GYSNP0295 |
| AATATTTAATGTTATGATTCATACCTGCAAGAGCTGGTTA | | ACCTTGACGAGTTTTGTCCACAAAGGGAGGTTGCAATT[G/A]T | | | | | |
| TCAAATACATTACCAATTGTCATCTT_NODE_1_length_563_ | | TAGAGTATGTCGAGAGTTCGATTTCACCATCAGATATATGTT | | | | | |
| cov_79.428062 | | AGGTTTCCATATGATCCTTTTGAATTCCGTGGTTTTT | | | | | |
| RAD_kmer_0000944_1_TGCAGGAGAGCGGTACCGCAGTTCT | 160 | TCCATATATTCAAATATTTTCCTTTTTTCTTCAATATAATCGTC | Y | C | Y | C | GYSNP0296 |
| CGACGGTCGGGATTAATCTTGTAAGTGTAGAAGAAAGAC | | CAATTAAATAATAAATACCATCATCTTTTAGATTAA[T/C]AGT | | | | | |
| CAACCGATTGAAGATAGATGTTTTTTT_NODE_1_length_581_ | | CCAATCAGAATTCTAAAACAATTCTATCATAATCACTAAATC | | | | | |
| cov_167.290878 | | CATAAATCACAAATTACTAGGGGTCTGTTATGTTA | | | | | |
| RAD_kmer_0000944_1_TGCAGGAGAGCGGTACCGCAGTTCT | 304 | AGGGGTCTGTTATGTTACATATATATATACAACTTCAAGGAC | M | A | C | A | GYSNP0297 |
| CGACGGTCGGGATTAATCTTGTAAGTGTAGAAGAAAGAC | | TCATTATAAACATTCTATAACTTAAATACTATCTTCAA[C/A]T | | | | | |
| CAACCGATTGAAGATAGATGTTTTTTT_NODE_1_length_581_ | | ACCCTAAAAACCCAAATTGTCTCCATAATTAAGACGATCATA | | | | | |
| cov_167.290878 | | TTCATCGATTCATCTCTATGAATCTTCTTAACCTTCA | | | | | |
| RAD_kmer_0000951_1_TGCAGGTTTATGCACACAACTTTAT | 362 | CAAAAAAACAAGGTGTCCGGGCACCCCGGCCCCTACAAAGC | T | C | Y | Y | GYSNP0298 |
| TCCGAGTCCTAGAGGAAATCTACGGGGTTAAGTACTAAGT | | TTAACCAATGATTACAATGAAACCTTTAACATCACCTGA[T/C] | | | | | |
| AGTCAACTGATATTGTTTATTGTCAA_NODE_1_length_422_ | | TTCTTATATCAAATTCTACTAGCACCTTTTTAGTTTGCTTGCA | | | | | |
| cov_30.848341 | | ATTTTTACCGACCTTCAGCATCCTACAAAGAAGTTAA | | | | | |
| RAD_kmer_0000958_1_TGCAGGCGTACAACCAACATCCAGA | 230 | AACGGAATTACATAATCAACAACAACCTCACTCTCTATAAAA | W | W | W | A | GYSNP0299 |
| GCACCTAAGGGTCCTACAAAATACACAACCGCTACTTGAT | | TCCTTCACTTTCGATTTATGCAGCTCTGCATCTGCATC[A/T]AT | | | | | |
| GACTTTGTGATTGTTGACTGGATATC_NODE_1_length_517_ | | AGCCTCCAAATCAGGAAAAACAGCAATCATACCGATTGAGTA | | | | | |
| cov_166.827850 | | CCCCTTGGCCATTTCATGAGATAAACTCTCACCAAC | | | | | |
| RAD_kmer_0000958_1_TGCAGGCGTACAACCAACATCCAGA | 449 | TCATTTTCAACCAAATCCTCCTTTAACTTCAATAACGTAACCC | R | R | A | G | GYSNP0300 |
| GCACCTAAGGGTCCTACAAAATACACAACCGCTACTTGAT | | TCATCACAGATCCTGCCTTCAGCGGGGTCGCGACTACC[A/G]TC | | | | | |
| GACTTTGTGATTGTTGACTGGATATC_NODE_1_length_517_ | | AGATATCCAGTCAACAATCACAAAGTCATCAAGTAGCGGTTG | | | | | |
| cov_166.827850 | | TGTATTTTGTAGGACCCTTAGGTGCTCTGGATGTTG | | | | | |
| RAD_kmer_0000967_1_TGCAGGCTTCTCATGTCTTTGCCAA | 497 | GAACTGAATCTACGTCTTTTTTCCCGAATTCCAGAATGATCTT | A | G | R | G | GYSNP0301 |
| CAACACATCTAACACAGGCACTCTAGTTCACTTGGAAATG | | TGATACATGCAACACTGCATCCGTGTTTGTTTCCACC[A/G]CA | | | | | |
| GGTGATTTAAACTTGCAAATGGCCGA_NODE_1_length_597_ | | AAAAAGCTTGATTTCAAAGATTCTTGAAATTCATCGGCCATTT | | | | | |
| cov_137.639862 | | GCAAGTTTAAATCACCCATTTCCAAGTGAACTAGA | | | | | |
| RAD_kmer_0000970_1_TGCAGGAGTGCCGTCGTTTTTCACC | 303 | CATGATTAAGAATAGACTTTTTTTATATTCAATTTTAACTCAA | — | K | G | R | GYSNP0302 |
| GTGTAATGTGGCAAGAGTTTGGTCATTATCTGTTTGGCTT | | GTTTGAAAAGAATGATTGCATGTTAATCTTGGGTTAA[G/A,T]A | | | | | |
| GTAGAAAACTATAAAACAAACATGTA_NODE_1_length_396_ | | ATTAAGCCTCGCAATGAGGAAGTGGTATACATGTTTGTTTTAT | | | | | |
| cov_110.340912 | | AGTTTTCTACAAGCCAAACAGATAATGACCAAACTC | | | | | |
| RAD_kmer_0000979_1_TGCAGGTACTCATTGTCCTAGTGGG | 173 | GGAGGATCTGCAACAATGTTTAGACACTTCACTGCTTAAATT | A | A | G | A | GYSNP0303 |
| CCCATGTATGGCAGTTCCTTGTGCTTGAACCATCATCAGC | | TGGCTTATTAATGAAATGGACATATGTGGCAATTTTCA[G/A]C | | | | | |
| TAGAGTGGCAAAACAGGGGGTTTGGT_NODE_1_length_577_ | | AATTACCAATAAATATGTCAATTTGGGTTACGTATTACCTCTA | | | | | |
| cov_99.325821 | | ACAGGTCACAAGGACTAAGCTACATATTTTACTAAA | | | | | |
| RAD_kmer_0000990_1_TGCAGGCATACAGGGAGCCAGGCA | 287 | TTCGCCAGAGTTTTGTCAACTTCTTCGTAGGACCCAATAACAG | G | G | G | — | GYSNP0304 |
| TGCTCGATTTCAGATCCCATTTTCGGATCTTAACCTAAACC | | AAAGATCAAGAATCCGACCCAAATTTTCTGATTCCAA[A/G]A | | | | | |
| ACAAACTTCACTTAAACCTTTTCCCT_NODE_1_length_600_ | | ATACTTCACAATGATGACCCGAAACCAGCTCTCTGTGAGCAG | | | | | |
| cov_129.373337 | | CATTTTCATCAGATGAATGCATAACGTGTGAGCTTTG | | | | | |
| RAD_kmer_0000996_1_TGCAGGTCCATAATCCATTTGGACT | 183 | TTAATACTAACCGTAACTACCTAAGTTTCCAGCTATAAGCATC | — | G | R | R | GYSNP0305 |
| CCTCTTGGCCCAGAAGCTGTTAAGGCCCACATCTGATTTA | | AACCAATCAACAATAATTAAAACGCTAGTAAACGCAA[A/G]A | | | | | |
| AAGAAAACGTGATCCAAACACAAAAG_NODE_2_length_473_ | | AAGTTACCAATACGATTAAGAAAAGCTAACTGGTTCAAATAC | | | | | |
| cov_53.059196 | | AAATAACTGTTGAACTAAATCAACACAAGTAGTCAAG | | | | | |
| RAD_kmer_0000996_1_TGCAGGTCCATAATCCATTTGGACT | 238 | ATAATTAAAACGCTAGTAAACGCAAAAAAGTTACCAATACG | — | T | K | T | GYSNP0306 |
| CCTCTTGGCCCAGAAGCTGTTAAGGCCCACATCTGATTTA | | ATTAAGAAAAGCTAACTGGTTCAAATACAAATAACTGTT[G/T] | | | | | |
| AAGAAAACGTGATCCAAACACAAAAG_NODE_2_length_473_ | | AACTAAATCAACACAAGTAGTCAAGATATACTAGTTCGTAAC | | | | | |
| cov_53.059196 | | AGCAAAGAATAACTGAAAATAAGAATTATAAACTGAAA | | | | | |
| RAD_kmer_0001003_1_TGCAGGAAACCCCACATGGCGTACA | 188 | AGCAATGTGCGGGTAACTACGGCTCTAGTTACGACAAATTTA | T | C | C | — | GYSNP0307 |
| TCAGCCAGCTTATGGTGTCTACTGTAAGACAACGTATTGT | | GTGGTTTAAAAAAACAATTATGACATTATAAATTTAAA[C/T]A | | | | | |
| GGTTTAACTAAAAAGGGCATAATGCT_NODE_1_length_601_ | | TATGAAAGGTAGAGTACCTTAAAAGTACTAAAAATTTATATG | | | | | |
| cov_63.158070 | | TAAAATTGTTCTATTCAGTGTTTGTGACAATAGTGTG | | | | | |
| RAD_kmer_0001003_1_TGCAGGA4ACCCCACATGGCGTACA | 346 | GTGTACCTATGATGAATGAAATGTTCGGAATGATGGATGGCT | T | C | Y | — | GYSNP0308 |
| TCAGCCAGCTTATGGTGTCTACTGTAAGACAACGTATTGT | | AGACACCTGTTGTGGAGAAAAGCCCAAAGCGTTACCAT[C/T] | | | | | |
| GGTTTAACTAAAAAGGGCATAATGCT_NODE_1_length_601_ | | CCACCTTACCCAAGCATGCACCATACACCATGCCAACATCGT | | | | | |
| cov_63.158070 | | GAAAGGGGATTTTGAGGTGGGGTCCATCCCATTTCAAC | | | | | |
| RAD_kmer_0001004_1_TGCAGGTGGTAGTGGGGATAATGA | 141 | TTACACCACCCACTACTTTTATAACTTTGAAAATCACTCGAAA | — | T | C | T | GYSNP0309 |
| ATCAAATACTGAGAATATCTCCACATTTCCATGGTCTCTTT | | TATAGAGTCCATAAAACCTCTTAAGTTGCTATATTAA[C/T]AG | | | | | |
| TCACCAAATCTCCCAGACGCCGTATG_NODE_length_556_ | | AAGTTGAAACTTGGAATACTACTACTGAAATCGCGTATTTCT | | | | | |
| cov_121.838127 | | ATTCATCATATATTTGTGAAAAAAAAGTACAAGGCG | | | | | |
| RAD_kmer_0001009_1_TGCAGGTTACAATATCCTTCATTAA | 338 | CTTTAATGATTTTATATAACTTGAAAATGTTTGTTTGTGAGTT | C | M | C | M | GYSNP0310 |
| AATTTCACTAGAACCAAAATACTCAGTTTGGTTTGTTCCA | | GCAGATTAAAGATGGTGTTTGGGATTAGTGAAATAAT[C/A]TG | | | | | |
| AAACAACATAATATACAACAAGAGAT_NODE_2_length_414_ | | TTTTTAATAGGAAAAACGCGTAAAATTCGTACATTTTGTGTTT | | | | | |
| cov_49.429951 | | ACGTTGTGTTAAATTGATGAATTACGTTAGGCTTT | | | | | |
| RAD_kmer_0001015_1_TGCAGGCTTCCCACCTCTGGGTGCT | 140 | CACATGTAAAGATTAAGGAGAATAGAACTTTGACAATCAAA | C | C | Y | Y | GYSNP0311 |
| CACGGAGTAAGTGAAATTATGCTTTTATTTACAGTCATTT | | AATTATAGTTTATGGAAGGGAGAAAATAGAGAAAGTATG[T/C] | | | | | |
| GAAGTTTTAGTTCAAACTGAGTTTTC_NODE_1_length_475_ | | CATACTTCATCAGATATACCAAATGTACGTGTTCTCTTCAAA | | | | | |
| cov_51.378948 | | GCGTGTTCAGAATCAGCTGTTTGATAATCTACAGCTGG | | | | | |
| RAD_kmer_0001017_1_TGCAGGACCCACTTGACCCAAGCAG | 418 | ATTCGTAGCATTCTACATATCATTTTAGAAATTTCTGCAGAAA | G | T | G | G | GYSNP0312 |
| TAACTATGGTTGGATATCGTGCATTTTACAACAAACAAAA | | GAAAACAAGACCTATACTTCATTTTGTGACCGCTTTC[G/T]TG | | | | | |
| GATAATTAAATCTATTTAGAAACTAC_NODE_1_length_524_ | | GTTTTAAGTAGAAAGTTAGCGGGTTGAGTTTTACTCAGTGTA | | | | | |
| cov_90.440842 | | GTTTCTAAATAGATTTAATTATCTTTTGTTTGTTGT | | | | | |
| RAD_kmer_0001029_1_TGCAGGATGCAAGCATATGAAGAA | 100 | CGTTCGCATCAACTCCCGATCACACTGAGGGGGAGTATTAGC | T | — | T | K | GYSNP0313 |
| TGTTAGTAGCCAATAAAAAAATAAATATTTAAATATATAT | | ATATATGGCAACATATAAATTGTATTTAATGTAATAAT[T/G]T | | | | | |
| CGGTTTGGGATCTTTTTGATGAGAGTT_NODE_1_length_473_ | | GAATATATTAGTTGATAGGAAAGTCCATTAGATGACAACTGT | | | | | |
| cov_89.355179 | | ATTTCCTGATGTCCCTTCTTGATTGGAGTCTTCTCAT | | | | | |
| RAD_kmer_0001036_1_TGCAGGTTTCACTTTGGGATGTTGA | 248 | ATTAATCGGTAAATTGCATGTTTCAAATCCTTTCCGAAATATC | T | C | T | — | GYSNP0314 |
| ATCTAGCGCTTGTCCCTCATTCACATCAACAAGTAGTGAG | | ATATTTTCTGCTTTCCCGCATGTTCTTCTACTTAAGC[T/C]AAT | | | | | |
| GTCACGTTGTGGAAGCTGTGGCTAGA_NODE_1_length_532_ | | GCGTTTTGAATATGACTGCAAGTGGGAAAACAATAAAAGTAA | | | | | |
| cov_73.827065 | | GTACCATTTGTTCCATCCTTTTGGAGTTTACTTGA | | | | | |
| RAD_kmer_0001040_1_TGCAGGTGGCTTTATTAGCATGGCA | 330 | CTCCACATTCCATTTGGTCTTGGCATCGTGCAGTCTTCGGTTA | C | Y | Y | C | GYSNP0315 |
| ATATGCCGCTTTTTGGACGTCCTATGTCTGCTCACAATTTC | | ACTTAAGCATGATGAAATGGCTATCTTGCACTGATGA[T/C]GT | | | | | |
| CAAGGGATGTTTTAAGGAAAAAGCA_NODE_1_length_619_ | | GTGTCTTATAACCCATAATTAATTAGTACTTAATGATTACGTG | | | | | |
| cov_155.336029 | | CGTGCCATGACCCATAATTAATTAGTACTTAGCAA | | | | | |
| RAD_kmer_0001043_1_TGCAGGAGATGAAAAACAAAGAAA | 134 | AATGAAAGCTTTAATATATAAGTTAAACTACAGCTTACATAGG | K | K | G | G | GYSNP0316 |
| CACAACTGCAAATAAAGGGCCAAAGAGAGGCAAGAACAT | | TTAATACATGGAAACAAAACATGAAAATGTCAACCCAA[G/T] | | | | | |
| GTGCAACATTGTAACAACACTGTCTACC_NODE_1_length_606_ | | TTACCGTGTGTCGTTGTTATGCCTAGCCAAACATCTAACCATC | | | | | |
| cov_94.120461 | | ATGCATTACATCATATATATAAAACAGTGTGATCAAA | | | | | |
| RAD_kmer_0001051_1_TGCAGGTAACTCATAATTAGCTATA | 113 | TTAGCTTAAAAGGAACAATGCCAAATGGGTGTTAAAGCCTTC | M | C | M | A | GYSNP0317 |
| GGTTAATCAGATAATCTATAATTTGAAAACAAGAAGCTAT | | TAATGTGTAAAAAGTCGTAAACAATATTATTCAAAACA[C/A]T | | | | | |
| TATAATGCTAACGTTTTCTATAATCG_NODE_2_length_598_ | | AGATTATTATAGAAACCATATAATTGTGTAATTATATATGAC | | | | | |
| cov_117.454849 | | ATACAAATTATTACTAAAAATCTTAACATGAACAAAA | | | | | |
| RAD_kmer_0001051_1_TGCAGGTAACTCATAATTAGCTATA | 196 | GATTATTATAGAAACCATATAATTGTGTAATTATATATGACAT | Y | T | T | C | GYSNP0318 |
| GGTTAATCAGATAATCTATAATTTGAAAACAAGAAGCTAT | | ACAAATTATTACTAAAAATCTTAACATGAACAAAAAG[T/C]GT | | | | | |
| TATAATGCTAACGTTTTCTATAATCG_NODE_2_length_598_ | | TTCTGATTAACCTGACCCAGCCAAACAAACCAAAAAACGCGG | | | | | |
| cov_117.454849 | | CCCAAACCAACCCAGAAAACACCATTTTGATCCATT | | | | | |
| RAD_kmer_0001053_1_TGCAGGTCAAAATATGAAAATTAGC | 449 | CCCGCTTACCCGCCCTTTTTTGATTAAAAAAAATACATACATT | A | G | A | G | GYSNP0319 |
| CCGTTTGACTCAAATAGTTAAAAATGTTCATCTTCATTTGA | | CTTATTCAGGTATGCAGAGCAGCTTGTTGGCACTTGC[A/G]TT | | | | | |
| CTACAAAATGTATAAAATTCAACTT_NODE_1_length_570_cov_ | | AGCGAATAACTTCTTTAAAGATCCGCTAGTGAGCATTCCTCC | | | | | |
| 130.871933 | | AGCAATATCAGTAAGTTGAATTTTATACATTTTGTA | | | | | |
| RAD_kmer_0001058_1_TGCAGGTTTTTAAAGTATGAGAATA | 250 | ATGGGAATGGATTATACTTTCTAACACAACCTTAAACTCATA | C | A | C | A | GYSNP0320 |
| TCGTCTTGGAATCAAATATGGTTTAAACTAAAAAAATGTG | | TGCTTAATTCAAAACCGGCTAAATAACTACCTCTTGAT[C/A]T | | | | | |
| TCTGTATGTGTAGAACCCACCTTTGC_NODE_1_length_557_ | | TGATGAAGTAAAACAGTTATCTAAAGCTCAAAAAAAGTGGTT | | | | | |
| cov_148.012573 | | GTTTTGTGTTTTTTCTGACATTTTTTTTTTGTCTTAA | | | | | |
| RAD_kmer_0001060_1_TGCAGGTATTACACACGCCCTCAAA | 396 | CCCCTTGTTTATAGTTTTAGCATGTAAATGTGAGAACCAGGTA | — | T | T | T | GYSNP0321 |
| TAGTCACATGGTCTTTCCATCTAGAAAAAATGAAGTGGCA | | GCCTTGTTTCATGTATCGGTACGATCAAGCTGTACAG[G/T]TT | | | | | |
| ATGATGTACCTTTATTAAAAATAAAT_NODE_1_length_543_ | | TTAGTGAGCTCGAGTGTTTCTGTTAACGTGTTAATGTTGTGGG | | | | | |
| cov_95.416206 | | TCCATATGGTTTGCTCTGGAGAACTCTCCTTTTTT | | | | | |
| RAD_kmer_0001063_1_TGCAGGCAAAGAAAAAATGAAGGT | 126 | GCCCGATTGGTGCATGTACCCCTTGTCTTTTGGCTATCAACGC | C | C | Y | — | GYSNP0322 |
| TTGCTTTAGCATAGATGCCAATGGTATTCTTGATGTCTCAG | | CACCACATGATGCATGAATAACCTTCCGCCGTTTTAA[C/T]GT | | | | | |
| CTAAGTTAATATCTACTGGTAATGAA_NODE_1_length_502_ | | TATTTTCACGAAATTAGTAAAATAACGTTAAAATTAGGGCGA | | | | | |
| cov_136.764938 | | TTTTACTTTTGCCCCCAAGGGCCCACACATATATAC | | | | | |
| RAD_kmer_0001063_1_TGCAGGCAAAGAAAAAATGAAGGT | 199 | GTTTTAACGTTATTTTCACGAAATTAGTAAAATAACGTTAAA | G | A | R | — | GYSNP0323 |
| TTGCTTTAGCATAGATGCCAATGGTATTCTTGATGTCTCAG | | ATTAGGGCGATTTTACTTTTGCCCCCAAGGGCCCACAC[A/G]T | | | | | |
| CTAAGTTAATATCTACTGGTAATGAA_NODE_1_length_502_ | | ATATACAGATATATCTGAAATAAAACCTTAAATGTTTTTTATA | | | | | |
| cov_136.764938 | | TATAAACATGAACCTCAAATAAAACCTTAATAAATA | | | | | |
| RAD_kmer_0001066_1_TGCAGGTTTAATTATAAATGTATCT | 126 | TAATCGAAATCAAGAGAGCTAGAATCTTCACTTCTACAGTTC | A | T | A | T | GYSNP0324 |
| TATTAATCTTCTAGGTTATGCGATGTTGAGTCGGTTGAGCT | | TATAGATTCAAGGTTCTATTATAGATAAAACGTAATTA[A/T]A | | | | | |
| TCGGTATGGGATCATCAGATGTAGT_NODE_1_length_617_cov_ | | GTCTTGTATTAATTATGTCTAAACTTCGAATCCTACACCATAC | | | | | |
| 103.207458 | | CATCTTGCCTTTCCGCCATACGTAAGATTGGCTAAA | | | | | |
| RAD_kmer_0001067_1_TGCAGGTTGATTGTAAGTGGGTGTA | 212 | GTCGGTTTGATAATAAAATCCACCTTTTCCTCCAAAATAAAGT | G | C | C | — | GYSNP0325 |
| CAGGTTAAAGCGGGATATATGCACATGGTAAAGTTACGT | | ATTCTTGGATGAAAGATGCATCTGTTGAAGAGCATAA[C/G]G | | | | | |
| ACTCGCTACAAAGTTCATCTTGTAGCC_NODE_1_length_633_ | | ATTGCTTCAATAGATATCCTAACAAGAAAAACAAACTACAAA | | | | | |
| cov_87.445496 | | TCCTTCATGTACCTCTTGTATGTTACTACGCACAGAC | | | | | |
| RAD_kmer_0001080_1_TGCAGGGCAGCTGGCAAAAGACAT | 346 | GGGATCCTTAGCTTCTCATATAGCTCGTGAGGCTTCCCTACGA | K | T | G | T | GYSNP0326 |
| TGAGAAAATGTCGGATGAGGCTGCAGCTAGTTTTGCCTTT | | TATTATAGCTATATGAACCTAGTGAATTTTCGTCAAT[G/T]CC | | | | | |
| TCACAGCTTAAAAATATTCTTCCTGAT_NODE_4_length_416_ | | CCAATGTGAAACCAGATACTGAATCTGCATAAAACAAGACAC | | | | | |
| cov_26.519230 | | CAAGAAAGAAATTTTTTTGAGGGTCTAGTCATTTAA | | | | | |
| RAD_kmer_0001085_1_TGCAGGTGTTTCAACCTGCTCCACA | 151 | CCAGGTTCAGAGGTGGGTCTGCCGGACTGGCCGGTTTGACTG | G | R | G | — | GYSNP0327 |
| TGGGCTTCATTTTCAATGGAGTTTTCAGCTTCTTCTTCATG | | GTAGAATTGATTGTTTTATTTTTCAGAAATATTAGTTC[G/A]TG | | | | | |
| CTGCMAAATAGAAACCAACTTACA_NODE_3_length_479_ | | AAAATTTAACTGATAAAGATGGTTTATGATCATAATACATAT | | | | | |
| cov_37.048016 | | ACATAACTACATACTCAATACATGATAATTGATAAA | | | | | |
| RAD_kmer_0001086_1_TGCAGGCTAAGCCCATTGAGAATTT | 90 | AATTCATATTGCGCGGAAATTAAAACCCCAACTGTTTGATTA | C | A | M | C | GYSNP0328 |
| CTTATTGATCTTTTGGTCCAAACTCAACTATTTAATATTTT | | ATGTGTCCAGTGAGAGTTTCTGATGGCTTTTGATGTCA[A/C]T | | | | | |
| CTGTCAACATTCTTGACAAAATGTA_NODE_1_length_497_cov_ | | GAATAAGCATAGTGCTAAGAATCAGCTTTCCTGTCATCAAGT | | | | | |
| 64.370224 | | TTTAATTAACTTATATAAAGATGTTACAAAAGCAATT | | | | | |
| RAD_kmer_0001089_1_TGCAGGCTTAATATTTTGTTTAATAC | 161 | GCTCATTGTACAATTTTACTCTACAGTGGTCGATTTCAAAAAA | C | S | S | C | GYSNP0329 |
| TATTTTTTTTGTTGTATAATTCAAACATAAATGGACGAAA | | ATGCACGCATCATGCATTCATGCGAGCGCATCAGGAG[C/G]G | | | | | |
| AATTATATTGGCAAGTTGATTCGAT_NODE_2_length_482_cov_ | | CATTACGCGATTTAGAGCGCATCATCCTCGCATCACGTAATA | | | | | |
| 35.348549 | | GCTGCACATCGCATCACCTGATGCGATCTCATCAGAG | | | | | |
| RAD_kmer_0001094_1_TGCAGGGTTATGGTAATAGAGATGG | 240 | TATAGGATTTTAGGATCTATGGGTTCTGATCACTTGATCTTTG | T | W | T | W | GYSNP0330 |
| TAAATGAATGAACTGGATAACAGGTCAAAGCGAGATACG | | GTACGTCTTGAGCCCATTAAGCTCGACACATCTAAGA[T/A]TT | | | | | |
| TCGAAATATGATTTGTCCAAAAAAAAA_NODE_1_length_617_ | | CAGATGGTTAGTCGAGTCAATTTGACTTGTTTATTCCCATGGT | | | | | |
| cov_112.348457 | | TGAAATGGATATTGCAGAGCAGAGCTGTCCTTTTT | | | | | |
| RAD_kmer_0001094_1_TGCAGGGTTATGGTAATAGAGATGG | 562 | GAATATAGTCATTGAAATAAAAATATTGTAACTATATCTGAC | G | K | G | K | GYSNP0331 |
| TAAATGAATGAACTCGATAACAGGTCAAAGCGAGATACG | | ATTTAAATTATATATAAAAAAAATCTAATTTTTTTTTT[G/T]GA | | | | | |
| TCCAAATATCATTTGTCCAAAAAAAAA_NODE_1_length_617_ | | CAAATGATATTTGGACGTATCTCGCTTTGACCTGTTATCCAGT | | | | | |
| cov_112.348457 | | TCATTCATTTACCATCTCTATTACCATAACCCTGC | | | | | |
| RAD_kmer_0001095_1_TGCAGGAAAATCCAGATTTATGGAA | 193 | CTCAAAAACCATGAGGGCTTTTATACTATAGCAGCCTTATTCT | C | — | C | G | GYSNP0332 |
| ATGGCTAACCGGGCAGGAACAACCTCCCGAACCAATCAA | | TGGTGCTTATAACATATGAAGTAAACTTATTCGTAAA[C/G]AG | | | | | |
| CACAAATCCCGTGAGTTACACATCAAC_NODE_3_length_277_ | | AGTTGTATATATATAATTACTGATTACCGACAATCGGGCTATC | | | | | |
| cov_54.646210 | | GCGACCTTTTTTAAAATCATCCCATCCTCTGACCC | | | | | |
| RAD_kmer_0001099_1_TGCAGGAGACTTTTTCAATGCATCA | 146 | GGTATGGAGCTGGTGAAGGCAGGGTAGAATTTTCAAGTGGA | C | C | M | M | GYSNP0333 |
| ATAGCCGAAGCAGTATCAGGATATTCATTTTCACCATTAA | | GAAAGTTCCGGATCTAGCAGTGGGAAAATGGACCCCACT[C/A] | | | | | |
| CATTCACAGAAAAACTCTTGAGGTAC_NODE_1_length_686_ | | ACGGTCTACAAATTGTTGGGATGAGTGCCACCTTGCCCAATG | | | | | |
| cov_131.437317 | | TTGGTGCAGTTGCTGACTGGCTTCAAGTAAGTTAAAAG | | | | | |
| RAD_kmer_0001099_1_TGCAGGAGACTTTTTCAATGCATCA | 281 | CTGACTGGCTTCAAGTAAGTTAAAAGAAAACATTATAATTTT | W | W | T | W | GYSNP0334 |
| ATAGCCGAAGCAGTATCAGGATATTCATTTTCACCATTAA | | TGGTTTACTATAAGCTGATTGTTGATACAGAATTAATA[T/A]C | | | | | |
| CATTCACAGAAAAACTCTTGAGGTAC_NODE_1_length_686_ | | TTTCAGGCAGCACTATACCAGACAGATTTTCGACCTGTTCCCC | | | | | |
| cov_131.437317 | | TTGAGGAGTATATTAAAGTGGGTAACTCAATTTATA | | | | | |
| RAD_kmer_0001103_1_TGCAGGTGTGGCTTCATTAACAGAC | 521 | GTTAGAAGGTTTGTAAAATAAACAAGCTGGTAGCTACTATGT | Y | M | Y | Y | GYSNP0335 |
| ATTGAAGATCTTCGTCCTTAATTAGGTTTATGGGTTGAGA | | TAATCCTTCCAAAATTCTAATTTCATAAACATGTGTAC[C/A,T] | | | | | |
| TTCTGTGTATGCCAAGCTGATTGTTG_NODE_1_length_645_ | | ATAACTAAAGGGAGATAAAAGTCATTGAAAATTTTGGGGTAA | | | | | |
| cov_131.268219 | | AAACCAAAAATCAATTACAACAATCAGCTTGGCATACA | | | | | |
| RAD_kmer_0001105_1_TGCAGGCCCAACCTTTATACTTTTCT | 100 | ATTGATCACTGATAATTGAGAGTACATGAAAGAAAGCAACA | C | — | C | A | GYSNP0336 |
| TTTTAAAGTGTGTGGAAACATGAAATAGCCCGATTGCACG | | ACCAAGACTCCTATAAATAACAAAGCAACAAACGGCTAC[C/A] | | | | | |
| ACAAGCAGCAGATCTCACAAATGGG_NODE_1_length_568_ | | TCCTAATAACTAGTAAGATCCAAAATACCCGGACAACTCAC | | | | | |
| cov_136.950699 | | AACAGCCTCAAACGGCTTTATTGAATTCAAAGTAACAAC | | | | | |
| RAD_kmer_0001107_1_TGCAGGCGAAAGAAGCACTACAGG | 244 | GACCTCTTTTCAAACTAAGCACGAACAGCTTCAACGATTCTC | K | T | T | K | GYSNP0337 |
| GCAAAGAAGATATCCAGATGCCAAATTTTGAAGTGAGTG | | GAAAAGTAAAACTGTGTGGTAGTAAGACCCCTCTTTCT[T/G]A | | | | | |
| ATTTAGAAAGCTTGAACGGGAAGTATGA_NODE_1_length_ | | TTTTCCAGCCAACTTTTTGTAACGCGCGTTCCACATCAGCTTC | | | | | |
| 380_cov_50.465790 | | TGAGTGAAGATATGCTCTTGTTGCCTTTGAAGGTCC | | | | | |
| RAD_kmer_0001125_1_TGCAGGGTGATGCAGAGAGACGTTT | 117 | GAATCTCCTAATTGTCTATTGAACATCTCAAAATAAATTATAC | T | T | W | W | GYSNP0338 |
| TGATGGAGTTAACCGTGGTATATCAACCTGCATAATTAAT | | CAATTACCATCCATCTTCAAATGTAGACCTACAGAAC[T/A]GA | | | | | |
| CATGATAAACTTGATTATGTGCTAAT_NODE_1_length_638_ | | AGCTAAAGCCACTCAACTCCTTGTTACTAAAGGGTTTGACTTC | | | | | |
| cov_125.206894 | | CGTGGGAAACAAGGATCAGTGTCCAGAATTGCAAG | | | | | |
| RAD_kmer_0001130_1_TGCAGGTTGTAGAAAAGAGCTTTAA | 127 | AAATACTTCTCAAGACTTGAAAAATATCATATTTGCCTAACA | T | Y | W | T | GYSNP0339 |
| AGATCTAGCGTACATCCGTGTGAATGATGGTTCATGTTCT | | AAAAAACATAATATCAAATATACCCATTTTTATATTTA[T/A,C] | | | | | |
| CAACAAATTATCGTCTACACAGACTC_NODE_1_length_503_ | | GACATATGTACCCCTCCGTTTATCTAAGTATTTAGATTATTAG | | | | | |
| cov_126.379723 | | AGTTTGAAGTGTAATGAGAAGGAAAAGTGTATGCTAG | | | | | |
| RAD_kmer_0001132_1_TGCAGGCGGATCATACGATTCATAT | 486 | CCACCCAAACCAAGCCCGGGAAATAAAGGTGCACCAGTCCC | W | W | W | T | GYSNP0340 |
| GGTGCGTGGTTCTGCTCCACCGCCGACTACTGATGCACCT | | CACACCACCTAACCCAACCCCTTCATTCTGACCAGCACC[A/T] | | | | | |
| GGAGCTGGAACGGCTAATACAGCTAA_NODE_1_length_563_ | | TGGGAGGGAGTATTAGCTGTATTAGCCGTTCCAGCTCCAGGT | | | | | |
| cov_97.341034 | | GCATCAGTAGTCGGCGGTGGAGCAGAACCACGCACCAT | | | | | |
| RAD_kmer_0001140_1_TGCAGGGTTATTATTGGGGTCCAAG | 308 | TTGATATAAAGTTACAAATTTTGAACATAAAGTGTTTTTGGTC | T | Y | T | Y | GYSNP0341 |
| AGAGTATGAGAGGATGCTTATATCAGATTATATCGATGCA | | AACCCATCCCAACCAGCTTTTTACTTGTACCAAACCT[T/C]TA | | | | | |
| CCTTGTTTGTCTCTTTATCTTAATGG_NODE_1_length_502_cov_ | | ACCGTTAACCAACCAGCCCATTTTGCCACCTCTAAATTCAGTG | | | | | |
| 184.796814 | | ACGTACTAATGCTCAACAGTCTACATCTACACTAC | | | | | |
| RAD_kmer_0001140_1_TGCAGGGTTATTATTGGGGTCCAAG | 375 | TTGTACCAAACCTTTAACCGTTAACCAACCAGCCCATTTTGCC | K | K | K | K | GYSNP0342 |
| AGAGTATGAGAGGATGCTTATATCAGATTATATCGATGCA | | ACCTCTAAATTCAGTGACGTACTAATGCTCAACAGTC[T/G]AC | | | | | |
| CCTTGTTTGTCTCTTTATCTTAATGG_NODE_1_length_502_cov_ | | ATCTACACTACAGTACACAATGTTAAAAAGATGTTAGGCTAT | | | | | |
| 184.796814 | | ATGTTTAGAGAAAACTTACCATTAAGATAAAGAGAC | | | | | |
| RAD_kmer_0001141_1_TGCAGGAATAGGCTACAGGCCTACA | 100 | AAGAAAATAGGCAAAAACAAAATACCTATATGCAGGAAAAA | A | G | G | G | GYSNP0343 |
| GATGCAATGATGACTCCGTTTAGTCCCAATCACGTGGGGC | | GTACCTTGGCTTGGAAGAGAGGTGTACGTTTGCAGCTCC[G/A] | | | | | |
| CTCATTCAGCCTCCACACTCTATATG_NODE_1_length_630_ | | ATAATCTTTCCTTTTTATCATTCTTTGGTCATAAGTGGCAAAG | | | | | |
| cov_106.209526 | | CAGAGCTCTCATGGAGCTAGTCAATTGTTGGGACCAA | | | | | |
| RAD_kmer_0001141_1_TGCAGGAATAGGCTACAGGCCTACA | 36 | CCCTGGCCAGCTCAGATTAGGTGTAGCGATTCGAAAGCTCTG | G | T | G | G | GYSNP0344 |
| GATGCAATGATGACTCCGTTTAGTCCCAATCACGTGGGGC | | GCAGGGTGCAGGCATGGCCCAAGCCCCTCAGCGGGGCC[G/T] | | | | | |
| CTCATTCAGCCTCCACACTCTATATG_NODE_1_length_630_ | | GGCTAATCCAAAACTTGCATCAGATTGCTGCTGCTGAGACTG | | | | | |
| cov_106.209526 | | CAATGCCATGTCATCAAGAAACATTATTTGCAAAATAA | | | | | |
| RAD_kmer_0001152_1_TGCAGGGAGATCTTTCTTTGCCAAA | 115 | GGGGCTGAGGAGGGTAAGATGTAGACAACCTTACCTCTACCC | C | T | T | C | GYSNP0345 |
| TGCAACCTGTTTTCAAGCAAAAAAAATAATAATCTTAATT | | CATGGGAATAGAGAGGCTACTTCCAGTGAGACCTCTGG[T/C]T | | | | | |
| CTTAACAAGATTAAATATGATGCATA_NODE_1_length_659_ | | CGATATAATTTTGCACAAAAATAATATATTTTATTGTCAGTGC | | | | | |
| cov_106.511383 | | TTCCAGAACAGATTCGGGGAACAAATATTACAATTC | | | | | |
| RAD_kmer_0001174_1_TGCAGGCACAGTTTTCAGGGAACCA | 521 | AATGCATATTGGCTTCGTCCATCCTGCAAGTAAAACCCATTA | A | W | A | W | GYSNP0346 |
| ATTCTCTGCAGAAACATCCCCAGGTTGATTCCAGGTAATT | | GAAATCCATGCAACAAAAGTTTTAGAATTAAAAAAAAT[A/T] | | | | | |
| ACCAATTTTCGTTGTGTTATCTATTT_NODE_1_length_585_cov_ | | AATAGATAACACAACGAAAATTGGTAATTACCTGGAATCAAC | | | | | |
| 133.753845 | | CTGGGGATGTTTCTGCAGAGAATTGGTTCCCTGAAAAC | | | | | |
| RAD_kmer_0001187_1_TGCAGGTTCAGTCCATAGACTTGTT | 124 | TGCTGGACGTCTGTTTCTTACCTTTTTTGCTTTGATTGAAGCTA | C | M | C | A | GYSNP0347 |
| TTCTTTTGCACTTACAATCCCTAAAACCTACCTACTCCATT | | AACAAGCGTAGATAATAAGGGTTATTTTAGTTAAAT[C/A]AAC | | | | | |
| ATAATCAAGCCCATTACTCTAATGC_NODE_2_length_342_cov_ | | TCGCATTTCATATTTTTATGCGGTGGTGTGTGTAATGTAGGAT | | | | | |
| 21.146198 | | GACTTTGGATGAGAGATCAGGACACACTATGTAC | | | | | |
| RAD_kmer_0001193_1_TGCAGGAGCTTTCAGACCTTAAGAA | 251 | AATTTTGACCCGTTATCAATTTGGTTTGTGTTCTTAAACAAGT | G | G | R | A | GYSNP0348 |
| AACTCTTAATGTGGAAGTAGACCAGCTTCCTATCCGTAAGA | | CATATAAATTAGCTAAAAAAAGTCAAATGAACCAAAC[A/G]G | | | | | |
| ACTTTTGAACTCCCTTCCAATCTAGT_NODE_1_length_585_cov_ | | GTGATATAAATTAGCTAAAAATCAAATGGACCAAACAGGTCA | | | | | |
| 97.170937 | | AACAAGTTTAAAGTTGTTGAAACTATTATCGTAAATA | | | | | |
| RAD_kmer_0001193_1_TGCAGGAGCTTTCAGACCTTAAGAA | 341 | AATTAGCTAAAAATCAAATGGACCAAACAGGTCAAACAAGT | T | T | Y | C | GYSNP0349 |
| AACTCTTAATGTGGAAGTAGACCAGCTTCGATCCGTAAGA | | TTAAAGTTGTTGAAACTATTATCGTAAATATATAGTTTG[C/T] | | | | | |
| ACTTTTGAACTCCCTTCCAATCTAGT_NODE_1_length_585_cov_ | | GTATCATAACTAACACATTTATTACTTATAATCTCTAGAAGAA | | | | | |
| 97.170937 | | TGGACAAAAAATGTTACCTACACAACATTTACTAAAA | | | | | |
| RAD_kmer_0001193_1_TGCAGGAGCTTTCAGACCTTAAGAA | 522 | ACCCACCCAAACCCATTTTGACCCGGTACACAACTTGCCCAT | C | T | C | C | GYSNP0350 |
| AACTCTTAATGTGGAAGTAGACCAGCTTCGATCCGTAAGA | | CCTGATACCATTTCTTTAGTTAGCATACAAATTCAGCA[C/T]T | | | | | |
| ACTTTTGAACTCCCTTCCAATCTAGT_NODE_1_length_585_cov_ | | AGATTGGAAGGGAGTTCAAAAGTTCTTACGGATCGAAGCTGG | | | | | |
| 97.170937 | | TCTACTTCCACATTAAGAGTTTTCTTAAGGTCTGAAA | | | | | |
| RAD_kmer_0001196_1_TGCAGGGGTCTTTAGTGGCATTTAT | 379 | ATCAATTTGGATCGCCGCATAAAACCTCGGGAGGAGACAATC | K | G | T | T | GYSNP0351 |
| TTGGCTTTTGTGGCACTTTGTGTATGTCACTAAATAGCCTT | | GGCCCTGCCTTGTTTGTTCTTATGAAAATAAAATGAAA[T/G]A | | | | | |
| TTTTGTAGTGTCGGAATGGTAGTTT_NODE_1_length_598_cov_ | | AAAGTCGAGAACTATTCTGATCGCACTAAGTGTTACACCTCC | | | | | |
| 73.244148 | | GATTATGAGTGTAAGTGTGAGTGAGCTGCGTAATGAA | | | | | |
| RAD_kmer_0001197_1_TGCAGGGGCTGGTGGAACCCCATAC | 244 | CATGTTGAAAACTGCTTAAGAGATGGTAATATACACAAAGGT | C | A | A | A | GYSNP0352 |
| AGAGTGAATCCATCAAGAAAGATGTTGTCTTTGACTTTGC | | AATATAGATGATGTAGTCCTTGTTGGTGGGTCAACTCG[A/C]A | | | | | |
| TGCATTCACCCTGATACACCAACTCT_NODE_1_length_599_ | | TTCCTAAGGTTCGCGAAATGTTAAGGGAATTGTTTGATTGGA | | | | | |
| cov_90.368950 | | AACCACTTTGCCAGAACATTAATGCTGATGAAGCAGT | | | | | |
| RAD_kmer_0001197_1_TGCAGGGGCTGGTGGAACCCCATAC | 334 | GTTCGCGAAATGTTAAGGGAATTGTTTGATTGGAAACCACTT | T | C | C | C | GYSNP0353 |
| AGAGTGAATCCATCAAGAAAGATGTTGTCTTTGACTTTGC | | TGCCAGAACATTAATGCTGATGAAGCAGTTGCTTATGG[C/T]G | | | | | |
| TGCATTCACCCTGATACACCAACTCT_NODE_1_length_599_ | | CAGCAGTGTTGGCTGCGAACTTGTGTGGTAATGGGAATAACA | | | | | |
| cov_90.368950 | | CTGTGAAGGATTTGGTACTTATAGATGTGACCCCTTT | | | | | |
| RAD_kmer_0001201_1_TGCAGGTAAGATTCAACTTTGTTGT | 165 | TTCTTATAACTTGTTGATTCATGTATCTCTTTTTGGCATCATAG | A | G | A | G | GYSNP0354 |
| TAGTTGTTCCATTTACTTTGTATGTTACATTGGAATCGGTA | | CTAAGCTTGAATTTTCATAAATTCACAGTCTACATT[A/G]AAT | | | | | |
| TTACGTTACGGTTTTATATATGCCC_NODE_1_length_594_cov_ | | GGAAATGTTATCACAATCCAAACAAAAAACTAACAGGTAAT | | | | | |
| 117.395622 | | GAACCTAATCACATATCTAGTGACTTTTGCTATCCA | | | | | |
| RAD_kmer_0001205_1_TGCAGGTCTCGGGAAAACCTTAACA | 91 | AATTATTGACTTTTAACTGCTATGAAATATGCAGTTACCTTTA | A | — | R | A | GYSNP0355 |
| GCCTTTGCTTGTCTAGCTGAAATTTAATTCACCAATAAGT | | TTTTTGATTTAGGGTGCAAATGTTGAAGATTTCATGT[A/G]AA | | | | | |
| AATTTTAATTGTAACATAGACAATGT_NODE_3_length_403_ | | TCAAAAACCTTGAATCACTTCTTTCCTTATTTTTTTTAGTTCAA | | | | | |
| cov_81.059555 | | ATTGTAGATTCTATTTATTTTATACCCTTCATAT | | | | | |
| RAD_kmer_0001207_1_TGCAGGATGAATAATAAAACAAAC | 271 | TCATCTATACAAAAACCACCTCGAATGGTGTACACGAGCTTG | — | C | T | C | GYSNP0356 |
| AAGTTCAACTTATAATGATGATTCAAAGACAAATAACATA | | TCCGTCACATCATACGGATTGTATGATAGGGCGAAAAC[T/C]G | | | | | |
| CACTGACTATAAGCTATTTATATCAGT_NODE_1_length_530_ | | GTCATACGGGCCGTATAACTTTGTAAGTCACATGAGTCATTTC | | | | | |
| cov_85.258492 | | TTTGTTAGTCAAAGACGTCATACTGGTCGTTTGATT | | | | | |
| RAD_kmer_0001211_1_TGCAGGCCAACAGAAGTTCAAGGTT | 230 | AAAACGAGCCATGCACAACTCTAAGATTCTAAATAGTAAGAA | T | T | A | T | GYSNP0357 |
| TGCTTTAACATAGATGTAAATGGTATTCTTCATGTTTCAGC | | ACTTCAAAAGCCACTATGACAAAGTCGGATAGGTCGGT[A/T] | | | | | |
| TGAGGTTATATCCACAGGTAATAAA_NODE_1_length_546_cov_ | | CGAATATTCATTGCAACAAAAATAAATTAAAACCAAAAGTAA | | | | | |
| 73.686813 | | TTTGTAATTCTTTGTGGCAAGATTGAGTTGTTTCCACT | | | | | |
| RAD_kmer_0001211_1_TGCAGGCCAACAGAAGTTCAAGGTT | 333 | TAAATTAAAACCAAAAGTAATTTGTAATTCTTTGTGGCAAGA | M | C | M | A | GYSNP0358 |
| TGCTTTAACATAGATGTAAATGGTATTCTTCATGTTTCAGC | | TTGAGTTGTTTCCACTTGTTCATAACAGCAGCATACAT[A/C]A | | | | | |
| TGAGGTTATATCCACAGGTAATAAA_NODE_1_length_546_cov_ | | AAAATCTGTCGTAACAAGAAATTTTGGAAATAGAAACACCAT | | | | | |
| 73.686813 | | TAATGATCTGATTTTCTTCCTCATGGTCATTGCTCAA | | | | | |
| RAD_kmer_0001215_1_TGCAGGAAGTGGAAAGACAACACT | 251 | TTGTGCTCTTTACAACTATGATATCTAGACCTAAACCATGTTT | A | W | T | W | GYSNP0359 |
| CGCCAAATATATTTATGATTGTAACTTGCTAAAGTTTGAA | | GTATATCTGGAAGCCTACTTGTTATAATAATTTTGCT[T/A]TCT | | | | | |
| AGCAGCAGTTTTCTTGAAGACATTGGA_NODE_1_length_528_ | | ATATTAATCTTTTCCATTCCAAGTAAAGCTTCTATTTGTTCTTC | | | | | |
| cov_131.719696 | | CTTATCAATATCATCAAGAACAATAAGCACCCT | | | | | |
| RAD_kmer_0001218_1_TGCAGGCACAAGTTCCATGATGCAT | 162 | ATCATCCTTTCATTGTTGCTTTCACACTCATCTTTTTCTACAGT | M | C | M | M | GYSNP0360 |
| GCTTATACAAGTGGTTCTTAACTTGTAACAAGAATAGTTG | | CGAAAATTGTGGATTTAACTTCTACCAACTTCAACA[C/A]CCT | | | | | |
| TCCCGTATGCCGATCTCTATTTTGAC_NODE_1_length_337_cov_ | | TCCTTCCTTGAGGTTTTATTTTTATATATGCTGTGCTGTATCTC | | | | | |
| 53.629082 | | TCCTAGCCCTAGGTATATTTATATTATATACTC | | | | | |
| RAD_kmer_0001218_1_TGCAGGCACAAGTTCCATGATGCAT | 266 | TTTATATATGCTGTGCTGTATCTCTCCTAGCCCTAGGTATATT | Y | Y | C | Y | GYSNP0361 |
| GCTTATACAAGTGGTTCTTAACTTGTAACAAGAATAGTTG | | TATATTATATACTCAATTGGGTAAAACTATACATGCT[C/T]AA | | | | | |
| TCCCGTATGCCGATCTCTATTTTGAC_NODE_1_length_337_cov_ | | ATGTAGCATTCTTTATGTTTTGCAAATGTAAACATCTTACTTC | | | | | |
| 53.629082 | | CCCATTGATCATTTTAAACCAACTTCAAATTTATT | | | | | |
| RAD_kmer_0001220_1_TGCAGGACTCGCAGCAGTTTCGGTT | 195 | AAAAATACTAAAATTTTGGGGTTAAAAAGTTGGTATCTCAAC | A | C | C | — | GYSNP0362 |
| TCTAGAATCAAAACAGAAGATATGAGGAGGGCTATAAGA | | TAGAGTTCCAAAATGGTCATCATTTTTTTCCAGAAAAC[C/A]A | | | | | |
| CAAACAGAACCTGTTATTCCCATCATG_NODE_1_length_367_ | | TTAAATTGAATTGGAGTTCAATAACCATCAAAGTTTTCAATC | | | | | |
| cov_51.144413 | | ACTTTAACCATTAATTAGTCTCACAAATTCCCTATCT | | | | | |
| RAD_kmer_0001237_1_TGCAGGGTTTACAAACAGGCAATGT | 150 | TATGATATTGTTAATGAATATTTTTCTTCAATTCTAGGGAATA | G | A | G | — | GYSNP0363 |
| GGACTTTTAATGAATCTAATGCATAACTGATACGGAGTTG | | TCACGTTTTTCCTTTTTTGGTGGAATGCGTAAATAAT[G/A]GAT | | | | | |
| ATCCAAGAGTTAGTGAACTTTTACTT_NODE_2_length_384_ | | TGTCTTATTTTACGTGTTTATTTATGTCTTTAACTTAAATATTT | | | | | |
| cov_28.054688 | | ATTTAACCGTTTTCAAACTCAATGTTTAGGCAA | | | | | |
| RAD_kmer_0001237_1_TGCAGGGTTTACAAACAGGCAATGT | 263 | TTAACTTAAATATTTATTTAACCGTTTTCAAACTCAATGTTTA | T | T | K | — | GYSNP0364 |
| GGACTTTTAATGAATCTAATGCATAACTGATACGGAGTTG | | GGCAATACCTGTAGAAATTACAAACTGTTAAATAAAT[T/G]TT | | | | | |
| ATCCAAGAGTTAGTGAACTTTTACTT_NODE_2_length_384_ | | GAACCTAAAGACATAAATAAACGTATAAATTAAGGCAATTA | | | | | |
| cov_28.054688 | | GTGATATGCCCGTGTTACACTAAAGAGAGGAAAGACT | | | | | |
| RAD_kmer_0001239_1_TGCAGGCAGGAAAATATTTGGGAA | 245 | AAATCGAAGTTGAGGAACTTTATTAGCTTCAGAGAAGTTTTC | G | G | R | R | GYSNP0365 |
| AAAGGTACCCATGTTTGTCTTTCCATCAAATGGGGGAAAC | | AGTTGCAACTTGGATAGTGTCAAAATCAAACCGACGTA[G/A] | | | | | |
| TCAGGTATCATGTTCTCTTCAAGATTA_NODE_2_length_390_ | | TATGTGATTTTCACCTTGAATAGTATCAAGGTGGTACATCAA | | | | | |
| cov_84.505127 | | GGATTTCAAACTTATACTTCCATCTACAAGTTCAACAA | | | | | |
| RAD_kmer_0001243_1_TGCAGGTCTGCACAGATAAATGATG | 133 | AATTGGCATTTTACATATCCGTGGATTAAGGTTCATTTTACAA | R | — | R | G | GYSNP0366 |
| AATGCAAAAATATATAGAAAATAAAACATTATAATATCA | | GGGCACATTGTCGTTTTTTAGTTTATAGAGTAGAACA[G/A]TA | | | | | |
| GTGTCATAAGGCTTACTATAAGACATT_NODE_1_length_589_ | | ATTGTACAATTTCAAGGGTACAATGGTAATTTTACAATTTTAA | | | | | |
| cov_115.899834 | | GGATAAAATGGTCCTTTTACGAAAAAGCAAGAAAT | | | | | |
| RAD_kmer_0001253_1_TGCAGGTAACCCATAAACTATATGT | 109 | TTTCGTGCCATTTCACTCACTCGCTCAAATACAACTTTGTTGT | T | C | Y | C | GYSNP0367 |
| TAAGTGTTATAGTATAGAGTGAGTTAGTTAGCTAGTTTAG | | GATCAAAGTTCTCTCCTTGAAACCTTGGTAGAACCTA[C/T]GA | | | | | |
| TTACTTGTACTTTGTTGATCGTTTGA_NODE_1_length_644_cov_ | | AAGATGAAAAAAGAAAATTTTCAACAAAAGTATATACAGTT | | | | | |
| 100.869568 | | GAGGTTATGTTTATACCAATCAATATGATAACACAAG | | | | | |
| RAD_kmer_0001253_1_TGCAGGTAACCCATAAACTATATGT | 570 | TGGTTGTATTTTGGTTGTTCTTAGATTTAGCATAGATCAAATC | — | Y | T | C | GYSNP0368 |
| TAAGTGTTATAGTATAGAGTGAGTTAGTTAGCTAGTTTAG | | GCTGATCCCGAGGACTAAATTGCTTTCATTTATCCGG[T/C]AA | | | | | |
| TTACTTGTACTTTGTTGATCGTTTGA_NODE_1_length_644_cov_ | | ACATGCATCAAACGATCAACAAAGTACAAGTAACTAAACTA | | | | | |
| 100.869568 | | GCTAACTAACTCACTCTATACTATAACACTTAACATA | | | | | |
| RAD_kmer_0001257_1_TGCAGGTGCAGTCATGTTCTTGTTT | 194 | ATCAATGACCTACATTAAGAGAAACAATTTGACCGTCAAGCA | K | G | G | K | GYSNP0369 |
| GAAGGCGCGTTTGGTAATATTCTGCACACAGGAGACTGCA | | GTGCTGTCAAAACTGCCACGTCGATCAGATTGGGTGCC[G/T]T | | | | | |
| GGCTTACACCTGAGTGTTTGCGCAGA_NODE_1_length_549_ | | GTCTAAGCGGATCAGGCTGAATCCCAAACACTTTTGTCCAAA | | | | | |
| cov_171.843353 | | ATTTCTATTTTTTATGTACCAAAAACATCATTTTTAC | | | | | |
| RAD_kmer_0001268_1_TGCAGGCCAAATCTGATCAGTCTTA | 386 | ACGAGAAACATATAAAAACGCATGTCCGAATAAATAAAAAG | A | A | A | T | GYSNP0370 |
| GCCCAGAATTCTGATTATATGGGCTGCACGCTATTTTCTA | | TCATGGTAAATAATATTTTTAAAACACAAAGTAATTAAA[A/T] | | | | | |
| AAAAAACACTGGGCCGTTGACCAAAT_NODE_1_length_689_ | | ACGATAACCGAAATACTTGTACGCCGAACCGTAGCGTCAAAT | | | | | |
| cov_100.417999 | | CGCGTTCCCCGCGCCTTCTTCTCCGTTTAAACGCGACC | | | | | |
| RAD_kmer_0001268_1_TGCAGGCCAAATCTGATCAGTCTTA | 634 | TTGTTCAGCCTGTAAGTTGTAGGTCGAGACCCCCTTCTTCTTG | A | A | A | C | GYSNP0371 |
| GCCCAGAATTCTGATTATATGGGCTGCACGCTATTTTCTA | | TTAACTCATTCCCCTATTAAATGTTTTCATTTGCTTCA[A/C]CGG | | | | | |
| AAAAAACACTGGGCCGTTGACCAAAT_NODE_1_length_689_ | | CCCAGTGTTTTTTTAGAAAATAGCGTGCAGCCCATATAATCA | | | | | |
| cov_100.417999 | | GAATTCTGGGCTAAGACTGATCAGATTTGGCCTGC | | | | | |
| RAD_kmer_0001271_1_TGCAGGTCTTTTCATTTCTTGAGTAT | 407 | GAATTTCCAAACTTGGACAAGCTCTAACTATTGAAGTGAGGC | A | — | R | G | GYSNP0372 |
| TATCCCCAGGTTCGCAATTCATCCCTAGTATATTTATAGCC | | TTAGTAAACCTTCATCTTCATGAGCTCCGATAATCAGC[A/G]T | | | | | |
| ATTAATAGATATATTGTGAAATTG_NODE_1_length_541_cov_ | | CAGTTCCTTGACATTTGATAAAATAGGTAGGGAATTGAGCAC | | | | | |
| 106.574860 | | CAACAATCGCTACAACAAGAAAGAAACAATTTCACAA | | | | | |
| RAD_kmer_0001271_1_TGCAGGTCTTTTCATTTCTTGAGTAT | 484 | AGCATCAGTTCCTTGACATTTGATAAAATAGGTAGGGAATTG | G | A | A | A | GYSNP0373 |
| TATCCCCAGGTTCGCAATTCATCCCTAGTATATTTATAGCC | | AGCACCAACAATCGCTACAACAAGAAAGAAACAATTTC[A/G] | | | | | |
| ATTAATAGATATATTGTGAAATTG_NODE_1_length_541_cov_ | | CAATATATCTATTAATGGCTATAAATATACTAGGGATGAATT | | | | | |
| 106.574860 | | GCGAACCTGGGGATAATACTCAAGAAATGAAAAGACCT | | | | | |
| RAD_kmer_0001277_1_TGCAGGATCCTTTTCGTTTTAAATAT | 133 | TTACTTCGTTTCCTAGAATAGGTCCCCTTGTATCATTATATAT | T | — | W | T | GYSNP0374 |
| AGGCAGCCGTACTAAAAAGAAAATGTAACCTTAAATGTG | | TGTAACATTATTTGTGAATAATAATTAATTGATTGAG[A/T]TC | | | | | |
| GAAAAAAGGAAAGAAAGGTTACCGTC_NODE_1_length_493_ | | TCGTAATATATGATCCTAAACATGTGATATAAGTTTTATCGTG | | | | | |
| cov_93.945236 | | TTATTTTCTGTAGATCTAAAAATCTAAAGTAAAAA | | | | | |
| RAD_kmer_0001283_1_TGCAGGAAGAATCGCGGCAATCAT | 161 | GACCCATTCATAAGTAAACGTGCCTAAACTTCCAATTTTTCAT | G | A | G | R | GYSNP0375 |
| AGGCAGATCGCCCAAAAAGTTCAAATGGTACAGAAAAGA | | CTGGGCGTTTTATCCATAGGTTTCTATGTAGAGAAAT[G/A]TA | | | | | |
| ACTCGTTATATATAAGCCCTGTGTAGAT_NODE_1_length_485_ | | TGCAACCATGACCCAACTTTGTCTTTCTCCCTTCTCTGTCTAT | | | | | |
| cov_163.936081 | | AAAAGGGGCAATGGTTTTAATGTAAAATCTAAAGT | | | | | |
| RAD_kmer_0001289_1_TGCAGGATCTGCGCATGCGCATAAT | 488 | AGCAAATACGGCGCTGTTCTTAACTTTACTTGCATTGAGATG | T | T | G | T | GYSNP0376 |
| CATCATATCTAGGCAATGCATTCTCTCCAGCGATCAACAC | | AGGAACCATGAGCAGCCTCAGGAGGTGCATTGTGCTCC[G/T] | | | | | |
| ATGTGCTTCTCGTGTCGCCAACGCCA_NODE_1_length_572_ | | GAGAATCTTGTGCAGCAAGTGGCGTTGGCGACACGAGAAGC | | | | | |
| cov_135.288467 | | ACATGTGTTGATCGCTGGAGAGAATGCATTGCCTAGATA | | | | | |
| RAD_kmer_0001301_1_TGCAGGTTTACTATAAAGCAACTAA | 465 | GATATTAATCAAGATTACTTTCCACATCGGGTTTGCAGGCAA | — | T | A | T | GYSNP0377 |
| TTTGCCCACATCTTCCTGCGTCGTCTTTTTGGTGGAAGCGG | | TTTGGGTATGCCCAAGATATTCTAGCAGATATCATACT[A/T]G | | | | | |
| GACCCGTGGGGCCAAAGGATCCATG_NODE_1_length_658_ | | TTGACGACAATGAAGATGCTTGGGTTGACTATTCTACACCGC | | | | | |
| cov_67.209724 | | TGTTGAATCTAGAGGTATACATTCCACCAATAAAGTT | | | | | |
| RAD_kmer_0001305_1_TGCAGGACTAAAGTCAGGAGGTAT | 373 | TATTAAATATAATAATTTTATATATTTAAAGTCATCTCACATT | R | R | R | R | GYSNP0378 |
| ATAGGATAACAATTATGAATTTTACTTAATTGGAGTTCTA | | GTTACTTAAGTCACTAACTAATAATTTAATATATTAT[A/G]TTT | | | | | |
| AATTCAAGAAAAGAAAATCTATACCTA_NODE_1_length_545_ | | TACTACTATTTGTTTTCAATTAACTTTTTCAAATTAAGAAATA | | | | | |
| cov_72.849541 | | AAATATGAAGGTGGTGAATAAGAGAAGGAAGAAA | | | | | |
| RAD_kmer_0001308_1_TGCAGGATGACATTAAATTTACACA | 463 | TCTGTTTATAAGCGGAAGTAGAAGATTAACTTACTGAAAATA | A | A | C | — | GYSNP0379 |
| CTTTATCATACTCTTCTATTAATAGGTTACCCACCCACCCA | | CCTTATTTGGGTATAACTTATTAATATATTATAGAAAC[C/A]T | | | | | |
| TTTATAAAACATCAAAGTTTACAAA_NODE_1_length_599_cov_ | | CTACTTGAGATCTGCTTATTGTAACAACTTATTTCATCCTAAA | | | | | |
| 72.642738 | | ATAAGCATACACACCATATATTCTTTTTTTGTAAAC | | | | | |
| RAD_kmer_0001310_1_TGCAGGCTGCAAATCATTAGCCAAC | 123 | AAACAAGAAAAAGAAGAATAGTTGATTTATTTGAAGTTATGA | T | C | C | C | GYSNP0380 |
| AAAACCATATGGAACTACATCAACTTCTGAACAAAGATTC | | TGTCTTAGTGGCGCATTCATTGTATCTTTTATGTTGTT[C/T]AA | | | | | |
| ATAAATTTTAATAGCGATTATTAGAC_NODE_1_length_606_ | | GAATTTGCTGGGTTAGTTTGATAACATAAGGGGGAGAAGGTG | | | | | |
| cov_81.768974 | | TTAGGATCGGGTATCACGGCTGTTCAAATCATTTGA | | | | | |
| RAD_kmer_0001313_1_TGCAGGCCATCCTTGGGTACATGTT | 310 | TTTCCGACTCCTTAAGGTTAGCACCAACTCGTTTTAATCCAGC | K | G | K | G | GYSNP0381 |
| GACGGAGTGGCTCCAGATAAGCCGCTTGACTCTGCGGTTC | | CTTGAGCTGATCAAAAGTAATGTGACCACTATTATCG[G/T]TA | | | | | |
| TGAGTCGCATGAAACAGTTTTCAGCC_NODE_1_length_550_ | | TCTATCATCTGAAACATTTGTTTCAGCCCAGCTATTTCTTCTTC | | | | | |
| cov_93.465454 | | TGATAGGCTCTCTGCTATAACCTGCATCAAACTT | | | | | |
| RAD_kmer_0001315_1_TGCAGGGATATGCCCGAGTGTTGGC | 130 | TTTTGCCAATGATGGATGAGATCGATGGTGTGTTGATCCATGT | K | T | K | T | GYSNP0382 |
| GTTGGTGGGCACTTCAGTGGTGGCGGCTTCGGTGCTATGG | | TCTTGTAGACGTTGAAAATTGTGACTTTTGGTGGAAC[G/T]CT | | | | | |
| TGAGGAAATACGGCCTAGCGGCAGAT_NODE_1_length_338_ | | AACGAGCTTGATTTTCCATGAGACTATAACACCAAAGCTCGC | | | | | |
| cov_61.772190 | | CCCACCGCCACCTCTAATGGCCCAAAAAAGATCTTC | | | | | |
| RAD_kmer_0001319_1_TGCAGGTACCATAATCTTTTCTTTTA | 344 | AATCACTTCGTTTTTTTTTAGATTTTCGGTAAAATACTTCTTTT | R | A | R | A | GYSNP0383 |
| TAGAGGTGGTAGAACCGGGTTGAGTAACAAGTATTTTGTA | | TTACAGGAATTTATTATACAAAATTTGGACATGCAT[G/A]GAA | | | | | |
| TAGACAGGGGCGTACCCACATGTAA_NODE_1_length_546_ | | GTTTTAGGAACCCAATTCACCCTGGCCCATCATCGGCCAATC | | | | | |
| cov_137.333328 | | GGGGAATTAACCAAACTTCTAAGGATTTAATAAAA | | | | | |
| RAD_kmer_0001321_1_TGCAGGGATGTAGAAAAGTTGCAC | 172 | GTAACAAAGCTTCCTGGGGACGGAGTTTATTCAGGCTGTACA | W | T | W | T | GYSNP0384 |
| ATTATTAGGTCCTTCTCACAAGAAAAGCACATGAAACACC | | TGCAAACAGGGTGAGATTGAAGCAGTAGTCATCGCCAC[T/A] | | | | | |
| AAAAGCACAAAGAAATTTTAACCAACC_NODE_1_length_642_ | | GGTGTGCATACCTTCTTTGGAAAGGCTGCACATCTTGTAGATT | | | | | |
| cov_119.445480 | | CTACAAACCAAGTAGGCCATTTTCAGAAGGTATGAAA | | | | | |
| RAD_kmer_0001322_1_TGCAGGATTTTGGTCCGAAATGGCT | 222 | TCCTTCCCAGTGAATCGCGATCTTCTCACCGTTTCCAGCTTCT | T | T | C | T | GYSNP0385 |
| GCCGACTTCTACTGGAAGAAGAAATGGGGTCAACAGGTC | | ATGTTTCTATCCAAACAGTTATAGCAGATGTTTGTGA[C/T]TC | | | | | |
| TACTATGAGAATCTTGATATTACAAAA_NODE_1_length_395_ | | CACCCTTGAACCACTGGCAAGCACACCAACTTGTTAAGGATG | | | | | |
| cov_103.584808 | | GTATACAGTTGCAAGTGAAAAACATTAACAGTTGAT | | | | | |
| RAD_kmer_0001322_1_TGCAGGATTTTGGTCCGAAATGGCT | 320 | GGCAAGCACACCAACTTGTTAAGGATGGTATACAGTTGCAAG | T | T | C | T | GYSNP0386 |
| GCCGACTTCTACTGGAAGAAGAAATGGGGTCAACAGGTC | | TGAAAAAGATTAACAGTTGATTACTGATTACCTCTATA[C/T]T | | | | | |
| TACTATGAGAATCTTGATATTACAAAA_NODE_1_length_395_ | | AATATTTCCTTTTGTAATATCAAGATTCTCATAGTAGACCTGT | | | | | |
| cov_103.584808 | | TGACCCCATTTCTTCTTCCAGTAGAAGTCGGCAGCC | | | | | |
| RAD_kmer_0001323_1_TGCAGGCTGCAAATCATTAGCCAGC | 385 | GAACGTCTAAACTGACCTGATTACAGGATGGATGGATGTTTT | R | — | G | G | GYSNP0387 |
| AAAACCATATGGAACTACATCAACTTCTGAACAAAGATTT | | TACTGCTAGTCATGCTTGATTACAGGTAGAGGACTTAG[G/A]A | | | | | |
| ATAAAATTTTAATAGCGATTATTAGA_NODE_1_length_519_ | | AAGTTGCATTCATATATGGGGAGGAATAGGTATTAGTAGGTT | | | | | |
| cov_91.067436 | | TTTAAATTATTTTAGGTTGTATCCTGTCTAATAATCG | | | | | |
| RAD_kmer_0001326_1_TGCAGGTGTTTATCGAGCATTTGCA | 362 | AACACTATATAATTTTGTTTTCCAATTTTCAAACCGAAAACAT | Y | T | C | T | GYSNP0388 |
| AGAACTGGCGGTTCAAGGTTGATTAAATGTCGGTTTTGTC | | CCGGTTCTGATTAAAACCGAACCGAATGGAACCAAAC[C/T]G | | | | | |
| ATCGTTGTTGTTGTTGTAGTATAGAT_NODE_1_length_493_ | | TAATACACAATAACTTCTTCCTGTAGATGATCTGCTCGTAAAA | | | | | |
| cov_119.486816 | | CCCGACGCTAGAGAGGAACCGTATCTATACTACAAC | | | | | |
| RAD_kmer_0001329_1_TGCAGGTTATTTGAAGCACCAATAT | 118 | ACTATAATAAGTTACTTAGATAAAGGATGAAATGTTATATAT | T | — | T | K | GYSNP0389 |
| CACACGTACAAACCTAAAAAAGATAAAAGATATCTAAAC | | TGATTGTGGTGTTGCTAATTAGCGTTACAAGGGTGTCC[T/G]T | | | | | |
| AAGTTTAACTCTCATTAATTTTGTATT_NODE_1_length_590_ | | GTATATAAAGAGAACTGGCTTACAATCTCGTGTATTATACGG | | | | | |
| cov_94.132202 | | GCTGGTAAATGTAATGTTCTAAATAAAAAATTTATGA | | | | | |
| RAD_kmer_0001330_1_TGCAGGATTGCAAACACAATATTGA | 106 | AAGTATATACTTCTTAGGTGGTTCATTATTTCCACTCATGATT | G | S | S | G | GYSNP0390 |
| AGATAACCATAACATTTAACAAACTCACATACCAAGAAA | | GTAATTTTGAATCACATGATATTATTCTGACAACAA[G/C]GT | | | | | |
| ATAACCATTGTAACAATATTGGTGAAA_NODE_5_length_262_ | | CACTTAGCAACTTATGTTCTATCCGAGAGTATATGTTTTTAAA | | | | | |
| cov_37.744274 | | TATCTTTGTCAGTAAATGCATCTTTTGTAAAATTC | | | | | |
| RAD_kmer_0001333_1_TGCAGGATGCAGAAACCCGGTTGAC | 244 | GCAGTAATTGTAGGGAGTGATATGAGTGTGCAGACAAAATTT | T | C | C | C | GYSNP0391 |
| CCGTTCACCACAATCTCTGCAGTCCCTCCTGCTGATGTTCC | | GAAACAGAACTTAGGGATTTTGTAGCACAGAAAAAGAT[C/T] | | | | | |
| CTGCCAATTAACAAACATATATGTC_NODE_1_length_606_cov_ | | CAACATCGTGTTCATTTCGTTAATAAAACTCTTACTGTAGCCC | | | | | |
| 154.839935 | | CGTATTTAGCAGCAATTGATGTCCTAGTCCAAAACTC | | | | | |
| RAD_kmer_0001336_1_TGCAGGGTGCAACTTCATTCAAACA | 108 | CTATTTATAGTCATCCTCACCACAGTTGTAATACACCTGTC | C | M | M | M | GYSNP0392 |
| GGTTAATTTTAATCAAATAGTTCTCTAGAACTTGAATCTAT | | AAATAAAGATAAGTACTATTTATGTAAAAACGTAAAA[A/C]T | | | | | |
| TAAACCCTAATTACAAGATTAATTA_NODE_1_length_505_cov_ | | ACAAGGACGGAAATGACACTTAAGAAATAATACAGGGTCAT | | | | | |
| 153.463364 | | TTATTGACAAACTTTGATTCATACATGCATAAAACCTT | | | | | |
| RAD_kmer_0001336_1_TGCAGGGTGCAACTTCATTCAAACA | 219 | ATACAGGGTCATTTATTGACAAACTTTGATTCATACATGCATA | R | G | R | G | GYSNP0393 |
| GGTTAATTTTAATCAAATAGTTCTCTAGAACTTGAATCTAT | | AAACCTTCATAAATTCATCAAGCCAAATCACAAGGTG[G/A]C | | | | | |
| TAAACCCTAATTACAAGATTAATTA_NODE_1_length_505_cov_ | | ATTAAGCTTCACACAAATTGTAACGTCGATTGCATCAGATTA | | | | | |
| 153.463364 | | TCCCTTTCTTTCCTCTTTTGCTTCTTCTCTCTCTAAA | | | | | |
| RAD_kmer_0001338_1_TGCAGGAATGAAGGTTCTGTATTTT | 157 | TTTTGTTTCCATGTTGAGAATATGGCATGTAAAAGCAGCAAA | A | A | T | A | GYSNP0394 |
| TTTCTCACATTTAGTTGTGAACATGCTTGATGATTCGAGCT | | ATATGTCATTGTATAGGAGTTTAAAACAATCTATTGTC[T/A]A | | | | | |
| ATATATAAGAGTTTAGTTTGTTGCC_NODE_1_length_645_cov_ | | CATGACAAAACAGTTATCAGCTGCTCGAAATACAAAAAAGAT | | | | | |
| 118.851166 | | TCTTATATACTCCCTTTTTTGTGGTTTATGAAAAC | | | | | |
| RAD_kmer_0001342_1_TGCAGGCAACGGAAGGCGGCCA | 229 | CAACAATAATAAGTTATTGTGTCCACTAAACGAGCAACATCA | A | W | T | W | GYSNP0395 |
| TGGTGGCAAACATGGAGAGGATGAGAGATGAGAGTCTCC | | GTTTGTTGTTCCTCCATCTCTTTCTTTATCCCACCAAC[T/A]GC | | | | | |
| ATTGGAACGCTGAACGAGAGGATAGCCG_NODE_1_length_ | | CACACAACACAAGTGTGCTTTACATTCCTCCCAAATCGACGG | | | | | |
| 470_cov_126.774467 | | ACACAACAAATCTAACCAACTCTCATTACGATCTCA | | | | | |
| RAD_kmer_0001343_1_TGCAGGTCTATAGCTAGGGTAGAAA | 399 | CCCTCCGGTGACCAAGTTTGCCGTTAACGGTGGTCTATATTTT | T | A | T | T | GYSNP0396 |
| GCAACATAGTTTCAACTAGTCAACCACTCATATATAACCT | | GCCACTTTGTTTTTGTTGTTTGATCCTTCTTAAACTC[T/A]CAA | | | | | |
| CAACAAAAGTTTAATAAAAAGTTAAA_NODE_1_length_632_ | | ATCTCACCTGTAACGTAGTTAAAGCAAAGTGAGAGTTGTAGT | | | | | |
| cov_84.221519 | | AACATCATCTATTGCTTTTTTCCGGCAAAAAAGGA | | | | | |
| RAD_kmer_0001345_1_TGCAGG GTTTATCTAATGGACAA | 241 | AATAATCAAATTTATCACCCATTTTTAAGCAATAAAAAAGAT | G | A | R | A | GYSNP0397 |
| TATGCAATGAATAATCTTCCTATTACACGTTCTTTGGTATT | | TATACAGAAAGATAGTGCGAATGTATTATCCAAAAGCT[A/G] | | | | | |
| TTGTTTAGAAACATATTTTTCAATT_NODE_1_length_623_cov_ | | TAATACCTAGTTATCTTTTAGAACCACCAGCAGAGCTTAGAT | | | | | |
| 153.988770 | | GTCAATTTAACTTGGGATATTATTCATGTCAAACTAAT | | | | | |
| RAD_kmer_0001346_1_TGCAGGCATACAGGGAGCCAGGCA | 477 | TACTTTGTCTTCATTTTGGTCCAATTTATAGCTAGGATTACCA | K | K | K | K | GYSNP0398 |
| TGCGCGATTTCAGATCCCATTTTCGGATCTTAACCTAAAC | | ATGGTCAGCAAGCATGATATGTCATCATTATTGCCAT[T/G]AA | | | | | |
| CACAAACTTCACTTAAACCTTTTCCCT_NODE_1_length_581_ | | TGACATCATCAGGACCGTTGGGTGAATCAAAGTGTTTAGGGA | | | | | |
| cov_104.275391 | | AAAGGTTTAAGTGAAGTTTGTGGTTTAGGTTAAGAT | | | | | |
| RAD_kmer_0001347_1_TGCAGGAAAATGGCGCCAAATTTAG | 112 | AACAGGTCAAATAGGTGAAATATAAATATAATTAGCTTATAA | T | A | A | W | GYSNP0399 |
| AACAGTTGGTTATGTAAAGCACTAAAGCAGTTATTTAACC | | GGGATCCGGTCAAATGGGTTCAAAGTTACCCAGAATTT[A/T]T | | | | | |
| GCCAATATCAAAGGCTATATAAGGCC_NODE_1_length_590_ | | TTTTTTTAATTCATAAAACCTGAATTATTTTAGAAAAAAATAG | | | | | |
| cov_101.198303 | | ATTATTACTGTAACAGTATAATCTTTATAATCATAT | | | | | |
| RAD_kmer_0001351_1_TGCAGGCGGTTGAGGATAGAGATC | 510 | AAAATATCAAAACCAAAGACCGATGATGTCCCATCATTGGTT | A | R | R | A | GYSNP0400 |
| ACCCCCACCGATACCAGGAACCACCGGAGGCATAACCAT | | TTTCTTAATTCAACTTCAAGTTGCATCTTCCATGTAAC[A/G]AC | | | | | |
| CCTGCATTTTAGTTTCCTAATTAGCCAA_NODE_1_length_604_ | | ATGAGATTGAGATTGTAATATATCAGTTTGGCTAATTAGGAA | | | | | |
| cov_123.867546 | | ACTAAAATGCAGGATGGTTATGCCTCCGGTGGTTCC | | | | | |
| RAD_kmer_0001353_1_TGCAGGAAAGAAAGGGGAATGAGA | 330 | CAGATGCTCAACCATTTCTGTAGGTAGCAAAGGATTTGTCTC | A | T | A | T | GYSNP0401 |
| AAATCAAATCATCTTTGGTGAACGATCTTTTGCTGCATGT | | CTGTAAGGAAATACATTAGTGAAACAGAAACCAATAAA[A/T] | | | | | |
| AAATGAGAAATCATAAAGAAACTAA_NODE_1_length_514_ | | ATAATAATAAAAAGACTTGAAAACAAAGAAAAATGATGGTA | | | | | |
| cov_137.922180 | | TCTACATTACAAAGTGCTTCGGGTGAAAAAGCACTCGAG | | | | | |
| RAD_kmer_0001355_1_TGCAGGTTTTGGTTTCCAGATATAA | 164 | GCTTGTAAAAATAAAAACTATAAAGGTTGGTTTTAATGTCCG | G | R | G | R | GYSNP0402 |
| GAACTAGCTAAGAAAATGTGCACTTTGACTTTTTTGTC | | CTGGGTTTAGTTACTTTATACACATATAATTATAACCA[G/A]T | | | | | |
| AAACTGACTGATATGAAACTTGTTAG_NODE_1_length_684_ | | GTTGTAGAAATCGCTTGACGCTAGTTGGGCGTGAGGTACCAC | | | | | |
| cov_62.687134 | | CTAGGCTTAATCGGAATTAGTCGGGCGGTGAGGTACC | | | | | |
| RAD_kmer_0001355_1_TGCAGGTTTTGGTTTCCAGATATAA | 292 | GCTTAATCGGAATTAGTCGGGCGGTGAGGTACCGCCTAGGCC | G | R | G | R | GYSNP0403 |
| GAACTAGCTAAGAAAATGTGCACTTTGACTTTTTTAAGTC | | GATTTCTACAACACTGATTATAACAGAATCATAAAGTC[G/A]C | | | | | |
| AAACTGACTGATATGAAACTTGTTAG_NODE_1_length_684_ | | TAATCAAAAAATTTATAACCGAATCGTTGGTTTCTCAATTAGT | | | | | |
| cov.62.687134 | | TCGTTATGTTGCTTATCTGATTTGTCTACTAACTCC | | | | | |
| RAD_kmer_0001358_1_TGCAGGGACAAATGGGGGATCACTT | 252 | ATATGTACCGAATTAGGAAGGAGATATATGAATTATGAAGTT | S | S | C | S | GYSNP0404 |
| TTTCTCAGCACATGAAAACAATCAACCTAGAAGCAACATC | | ATCTTTATTATAATGTATGCAACTCCTTTTACTTAATT[C/G]GA | | | | | |
| AAAGTTACACTTATATAACAATTCTG_NODE_1_length_514_ | | CTGTTTGTATATTAGGTACCGTGTCTCTCTATTTGCCAGATGG | | | | | |
| cov_153.570038 | | AAACAAAGGGGGATGTATGCAGCATGTATGTGGAT | | | | | |
| RAD_kmer_0001361_1_TGCAGGAAGCGTAAATTCATCTATG | 410 | AATTCCCTCCAAGTTTTGGCGGTGGTGGAGGTGGCGGTGAAG | G | A | A | — | GYSNP0405 |
| CAACATACTCTTAAGCCTAGAGTTGTGAGGGCAGAATCAT | | GCGCTACTTCACGCAGTGCCTCATCAGAAGAAGGTCCA[A/G] | | | | | |
| CTTTGCGGCCTACCAGAAAGACAGAA_NODE_1_length_635_ | | GTGTAATGGGAGCAGAACCAGAGGCTTCCGGAGGAGAAGCT | | | | | |
| cov_90.703934 | | GGAGGAGCAGTGGCGCCAGAAGAAGCCAGAGAATCTCCA | | | | | |
| RAD_kmer_0001369_1_TGCAGGGAATCCAAACATGTACCAG | 501 | TTTAAACTATCAAATTAAAGTAGCATGTTTATGTGTTGTCGAA | C | — | A | C | GYSNP0406 |
| GTATGTTTCTTTATTATAATGTTTACCAATTTTCTTAATCCT | | CAGTGGTCTATTCAACTGTCTTAACTTTTTAATCAGA[A/C]CA | | | | | |
| GATTTTCCACACGTAATGTATATT_NODE_1_length_617_cov_ | | CACATTCAAGCATATGACAGGTAATATATTGTAACATCTCTA | | | | | |
| 75.437599 | | TAACAGAAATATACATTACGTGTGGAAAATCAGGAT | | | | | |
| RAD_kmer_0001371_1_TGCAGGTTACAGTAGTCACTACACG | 278 | TATGGGGTGGTTACGCGGATTGTTGTTGGTGGGTTTTTGGTTG | K | T | K | T | GYSNP0407 |
| ACAAAACACATCCAAACACCCCATAACTTTTATTGATTAC | | GGGTTCTTGTGATTGTGAATTTGGTTGGGTTTTTGGT[G/T]CAG | | | | | |
| GCAATAATAAAAGTATCCAAATTTAC_NODE_1_length_407_ | | AGTGTGTTTTATTATGTTTGTAAGAGTTTTCATCATCAAGGGA | | | | | |
| cov_52.761669 | | TTGATAAGAACGCGTTGTATGATCATTTGGGTGG | | | | | |
| RAD_kmer_0001375_1_TGCAGGACCCGACAACACCGCTTTA | 203 | GATTGGTAACCAGGCCCGTCCGAATATTTTTGATCTCACTGTA | C | Y | Y | T | GYSNP0408 |
| TGGCCCGAGAATCTGCTTTCGGGAGCAAGACCGCCATCCG | | TCAAAACCGTCTAATCTTTATGAAGAGGTTATAGAAG[T/C]TG | | | | | |
| ATTGCATAAAAAAAGAACATTAACCTTT_NODE_1_length_661_ | | ATGAGAGAATTGAGCTTGTTCCTGAGTCCGAGAAAACGATTT | | | | | |
| cov_115.547653 | | CCAACTCTGGTGACTTGAATGTGGTTACTGGCGTTT | | | | | |
| RAD_kmer_0001375_1_TGCAGGACCCGACAACACCGCTTTA | 384 | GTGAAGCCTGTTAGTGAAGAAACGTTGAGGCCGTTACTTGCT | S | S | S | S | GYSNP0409 |
| TGGCCCGAGAATCTGCTTTCGGGAGCAAGACCGCCATCCG | | GGTTTGTTAGAGAAAGGGATTAAGTGTTTAGCAGTTGT[C/G]T | | | | | |
| ATTGCATAAAAAGAACATTAACCTTT_NODE_1_length_661_ | | TAATGCATTCTTATACATATCCGCACCATGAGCTTTTTGTGAA | | | | | |
| cov_115.547653 | | CAATTTGGCTGTGAGCATGGGGTTCAAGCATGTTTC | | | | | |
| RAD_kmer_0001376_1_TGCAGGAATCAACAAGCATCACCCT | 498 | ACTTGTACAAAACTGATTATATGATCCCTAGATTAGTCAGAC | C | T | T | — | GYSNP0410 |
| AAGTATTTATATATAATCCAATCATTTTAAGAGGTGTGTG | | AATCTGAATCATTTTATATTAAACAATATCTACAACTT[T/C]A | | | | | |
| GCAATGCTTTTTGGAAGTGATTATCT_NODE_1_length_577_ | | AAACAGTAGAAGCAGATAATCACTTCCAAAAAGCATTGCCAC | | | | | |
| cov_79.727905 | | ACACCTCTTAAAATGATTGGATTATATATAAATACTT | | | | | |
| RAD_kmer_0001383_1_TGCAGGTTCATTCAGCAAATGTAAC | 112 | TCCTCGCCCTGCAGTAAAATTGCAGATGGCAATTTTGACCAG | A | G | R | R | GYSNP0411 |
| ACTTTTGCTTGTAATCCTTTTTTTCTTTTTGAAAATAATTA | | TTTACGATTGAAAGGATAGATTTAGTTGTGTTTGATTT[A/G]A | | | | | |
| AATTGGGTTATATTTAACTGATAA_NODE_1_length_621_cov_ | | GCATGTCACATAAAAAAAGTTGGCTAAAGTGGGTACGAAAA | | | | | |
| 84.165863 | | AATTAGATAAAGAAGGTACAGATCAAATGGGTTGAAAT | | | | | |
| RAD_kmer_0001384_1_TGCAGGGTTACAAATTAATACTTTT | 354 | AATGGTGAGAAAAATAGCAGGAAAGAGTATAATGGAGGATT | R | G | G | R | GYSNP0412 |
| AAGTTCCAAGACCATCCAAATGAAGATGCCAAAACAAAG | | CAGAAAGTGAGACCATTGTTGCTTTAGAGGGCATAATAT[G/A] | | | | | |
| TTAAACAAGTTACAATCATGAATACTG_NODE_1_length_615_ | | TCATCTTTGGTCATGTTTCCACAATAGATATTGAAATTAATTT | | | | | |
| cov_113.160973 | | GTGACCATGAAAAGAATGCTAGTTTGATTTTCTGCTG | | | | | |
| RAD_kmer_0001400_1_TGCAGGTAAAGGAGATATTGTCTCA | 82 | AAAGACCTTAGATTGTAAAATTTACCGACAAATATTCTATGT | G | — | R | G | GYSNP0413 |
| TTATCCGTCAAATTACAAGCAATCAGCAGTCATTCCTCTG | | CGATTCACTGAATAAAATACTTGCGATATATTTTATAT[A/G]T | | | | | |
| CTGGATCTTGCACAACAGCAGCATGG_NODE_1_length_502_ | | AACCCTTAGATTATTTAATAATCCTTAATTACAATGTAAATGC | | | | | |
| cov.115.017929 | | | | | | | |
| RAD_kmer_0001403_1_TGCAGGAGGTAATTGGGAATTTGGG | 84 | ATGCAATAAACACTATTTTTTTGGTATTATAAAATGCAAATGT | Y | T | T | Y | GYSNP0414 |
| ATTAAGCATGATGGAATGATTTAATATGAGAAAAATCAA | | TTTGCTTGGAGAAAATCAAGATAACTTAATTTTTTTG[T/C]TGT | | | | | |
| ATGGAAGATCCATACCGCACGAGACTG_NODE_1_length_538_ | | TTCTCAGGTGGTCCATACTCAAGCAAAGGTGATTGCAGATGA | | | | | |
| cov_137.618958 | | GGATGTGATGTATAAATACATATCGAAAAATATGC | | | | | |
| RAD_kmer_0001404_1_TGCAGGTGAATAATCAAGATTAGTGA | 383 | TACTTGAGTTTAATATTCTTTTTGTTTGCTTCACAGGTTTATGT | Y | Y | C | Y | GYSNP0415 |
| TATCCAAACTCTTCTAATCAAGTCCATTACAGAACTTCAC | | ATGGTGCAAGCAAAATCCATTAATTCATATGAGTTT[C/T]CTG | | | | | |
| ATTCTTAATATGGATGCAATGTATAA_NODE_1_length_524_ | | GGCATCTTTACTTTTACAGCAGGTTACTTACCATGGGTGAGTT | | | | | |
| cov_59.769085 | | CTTGTCAATACATATATCTATAACTTCTAAAAAT | | | | | |
| RAD_kmer_0001407_1_TGCAGGCTGTCCTTTGTCTCCGTTCT | 438 | ATACTATTCAAAGTCTACACCATAAAACTATTCATGCCTAGT | R | G | G | A | GYSNP0416 |
| GATACTGGCACACTAAACACTAGACATGAATAGTTTTCGC | | GTTTACTGTGTGGGATCAGAAACGGTCAAATGGAGACA[G/A] | | | | | |
| TGAGTTGACTTTGAATAGTTACTGA_NODE_1_length_509_cov_ | | GACAGCCTGCGGGAGGAGCCGAGAATGAAGCGTTTGGATAT | | | | | |
| 52.799606 | | CAGGTCTTGAGCAAATGACACTAGAAATAAGTCAGCTGA | | | | | |
| RAD_kmer_0001408_1_TGCAGGGAAAGAGAAGCACAATCT | 226 | ATTATCAGGATGGACACACAGGGACACCTTTCTGTAAGCTTT | C | C | T | — | GYSNP0417 |
| AATTGCTCTTAGAGAACAAGTCGAGAGAAATGTAATCATC | | CTTAACCACAGTGGTGATTATGATCTCTGTCAGTGACA[T/C]A | | | | | |
| TTTTGAATCAAATTTTCCGTTTTACCA_NODE_2_length_490_ | | GCTTACCAACAACTGGCGGCTCCAAGAATCTGTAGCAAATAT | | | | | |
| cov.52.179592 | | AAACATTCGAGCTAAATTTATCTTATATCCAGGTATG | | | | | |
| RAD_kmer_0001408_1_TGCAGGGAAAGAGAAGCACAATCT | 361 | CTAAATTTATCTTATATCCAGGTATGGTATAAAATTAGCAAA | C | C | G | C | GYSNP0418 |
| AATTGCTCTTAGAGAACAAGTCGAGAGAAATGTAATCATC | | AGATTACGTTAATGGGTGCCCCTCAAAGATAGAATCCA[G/C] | | | | | |
| TTTTGAATCAAATTTTCCGTTTTACCA_NODE_2_length_490_ | | GGGTGTATAATATTTAAGAAGATTTAGAAGGTTATACATACA | | | | | |
| cov_52.179592 | | TGTTGCAGCGTTGAAAGCAATGCACGCAAGTTCCCTCC | | | | | |
| RAD_kmer_0001410_1_TGCAGGGTAATACTAGGTGTTGTAA | 177 | AGGATTACACACTTACAAGTTACACCTAGACAGGTTTCTCAT | T | — | T | C | GYSNP0419 |
| AGAGGGGATTCCTTTGTATTGGATTGCCCCAAGGTGTTAG | | ACCCACCAAAAAGATTCATTAATCAGAAGTCCACGAAC[T/C] | | | | | |
| TTGTGTAGATATTGTTATCTTTCTTT_NODE_1_length_609_cov_ | | GCCACATCATCCTTGCCTAGCGAAGCACCCCACGGCCCAACC | | | | | |
| 103.036125 | | TCCTCTCTCACAAACCTGCAAGTAGAGCTGACATGGCC | | | | | |
| RAD_kmer_0001410_1_TGCAGGGTAATACTAGGTGTTGT | 403 | CGCGTGGGTCGATAGAACCCCTTGCAGATGCTCTAATCTTTGT | T | — | T | K | GYSNP0420 |
| AGAGGGGATTCCTTTGTATTGGATTGCCCCAAGGTGTTAG | | TTCCATCATGTTTATATCATCGGTTCATGTGATGCAT[T/G]TTT | | | | | |
| TTGTGTAGATATTGTTATCTTTCTTT_NODE_1_length_609_cov_ | | TTAATAAAACTGGAAAATGAACATATAAAGATTTTACACAGC | | | | | |
| 103.036125 | | TAGAGCATCTCAATGCATATTTATTTGACGTGTAT | | | | | |
| RAD_kmer_0001424_1_TGCAGGAAATGCGAAATTTGTTTTT | 290 | GGGGTTGACATGCTAACATGTGATTGGTTGCCCGGACGTTCC | K | G | K | T | GYSNP0421 |
| CTTAATCAACTTTAGGTTCCTTTGAATTTTAGATTAGTTCT | | GTTGGCACTTTATTAGCTTCTTTCCCTTATTTTTCCTA[T/G]ATT | | | | | |
| TGTTAATCAACTTCTGAGTTTGAT_NODE_1_length_471_cov_ | | CATTCTGCTCCATTGGCGCTTATTTAACACTAACCACGTCATT | | | | | |
| 102.513802 | | GGCATGTTTTTTCCATAACATTATTTTTTTTTAA | | | | | |
| RAD_kmer_0001424_1_TGCAGGAAATGCGAAATTTGTTTTT | 350 | TCTTTCCCTTATTTTTCCTATATTCATTCTGCTCCATTGGCGCT | T | C | Y | C | GYSNP0422 |
| CTTAATCAACTTTAGGTTCCTTTGAATTTTAGATTAGTTCT | | TATTTAACACTAACCACGTCATTGGCATGTTTTTTC[C/T]ATAA | | | | | |
| TGTTTTAATCAACTTCTGAGTTTGAT_NODE_1_length_471_cov_ | | CATTATTTTTTTTTCCTTCCTCACACATTCTTCTTATGACCC | | | | | |
| 102.513802 | | AAGTTAATATCAAACTCAGAAGTTGATTAAAC | | | | | |
| RAD_kmer_0001425_1_TGCAGGATACAAGCAAAGTGGTTA | 147 | ATACACACCATGTTTCAAGTTATAACCCTCCAAAAACCAAAA | C | C | Y | — | GYSNP0423 |
| AAATGGGAAAAAGCTTCGGAAAAAGCTTCTATATCCTTGT | | CTAGGTACAACAATACTAGTCTAGTAGTCTTGTCTATC[C/T]G | | | | | |
| ACGGATCAAATATTCGGTCGAATTAAA_NODE_1_length_661_ | | ACGAACGCACCACTGCTCGATAGTTATTGCCGCTCTCCTGGT | | | | | |
| cov_91.541603 | | GAATCCAAGAAAGGACAACCAAGCAAGATGACCTTGT | | | | | |
| RAD_kmer_0001425_1_TGCAGGATACAAGCAAAGTGGTTA | 294 | CAAGATGACCTTGTGACAACTAGCTCTCTTAATTCTAAGTTAA | G | A | G | — | GYSNP0424 |
| AAATGGGAAAAAGCTTCGGAAAAAGCTTCTATATCCTTGT | | TTTGAGGTTTTACTTGCGTACAATAAAATAAAGTCGA[G/A]CT | | | | | |
| ACGGATCAAATATTCGGTCGAATTAAA_NODE_1_length_661_ | | CATTCCTAATTTTGAATGTCCTGCTTTTGTATCGCGTATAATA | | | | | |
| cov_91.541603 | | CTACGTATCAGGTGGGACAAATGTGAGCCATACAA | | | | | |
| RAD_kmer_0001425_1_TGCAGGATACAAGCAAAGTGGTTA | 426 | ATCAGGTGGGACAAATGTGAGCCATACAAAGTAGAACACCA | T | C | T | T | GYSNP0425 |
| AAATGGGAAAAAGCTTCGGAAAAAGCTTCTATATCCTTGT | | TGGCCTAGCTTTATAAAGTAACATATATCACAATATAAT[T/C] | | | | | |
| ACGGATCAAATATTCGGTCGAATTAAA_NODE_1_length_661_ | | TTGATCTACAACATTAATCAAGTACCAAGAGGGAGTAGATCT | | | | | |
| cov_91.541603 | | AGTTTGGGTCGCAAAGAACATAATTTTCTAGTACAGGG | | | | | |
| RAD_kmer_0001429_1_TGCAGGATCACCCATTGAAGAAGTG | 286 | ACGACAATTTTGACCCGTTAACTTATGACATACGCGATATCG | G | — | R | R | GYSNP0426 |
| AAAAGAGAGTATGTTAGGAAGGTATGTGGTCAAATTTTCA | | GCCAAGTTTTCTGATTTGGTCACAGCCTTTCCTTCAGG[A/G]A | | | | | |
| CATGTATAAATGCTGTTAGAATTTAA_NODE_7_length_343_ | | GCTCCAAAGAAGTATAATGCATTATCATCTCTTTCAATGTGTA | | | | | |
| cov_56.151604 | | CTTAGTGTTTTTAATATCATGATCCCATAAAATGCT | | | | | |
| RAD_kmer_0001435_1_TGCAGGAAATGCAAGAATTAGTAG | 204 | TCGTTACATTTGGGTCCTGCTGAGTAAAAGATAACATGAGGG | W | A | W | W | GYSNP0427 |
| CACACAAATTTACATAATCCAAACCTTTGAAGAACCTGAT | | CCACAATATAAACATTGATTAATGAAGGGAAATAATGA[T/A] | | | | | |
| TTAGGAGGTTGTATGCACAAAAATGAC_NODE_2_length_345_ | | TATTGATTACACATGGACTGCTTCACCTTTTCTTGATTACTGG | | | | | |
| cov_69.953621 | | CCATCCCCCAACTACCTTAATTCATTGGTTTTGGCTA | | | | | |
| RAD_kmer_0001437_1_TGCAGGTGATGACTTTCCCATCGAC | 581 | GGTGCCTATAACAGAAATTTGACTAAAGTCGGTCACCTATTA | K | G | K | G | GYSNP0428 |
| ATGTGGTGCTTGTGCTGTTAGGTGTGAGACTCGGATGTTT | | AGGCTATTTGCCATTAAGCCCCTACAAGACAAAGTAAA[T/G] | | | | | |
| GTAACCAGTATCCTCTCTTATTTACT_NODE_1_length_639_cov_ | | AAGAGAGGATACTGGTTACAAACATCCGAGTCTCACACCTAA | | | | | |
| 78.317680 | | CAGCACAAGCACCACATGTCGATGGGAAAGTCATCACC | | | | | |
| RAD_kmer_0001438_1_TGCAGGTTGCTGACATACTCACTTA | 450 | TTAGTAGAGCTCCTATAAGAGAATTAATTATAGTTAAGCTTA | Y | C | Y | C | GYSNP0429 |
| GTGCTTTTAAAGATCAAATTCTGTAGTATTTATTAAGAGC | | AGCCTAGACGATCTGTAGATCTTTTGGGATGTTAGTAA[C/T]T | | | | | |
| AAGCTGGGTATGTTTTGACTTACATA_NODE_1_length_591_ | | CATCACTGACCGTGAGAAACATGACGACAGCCATCCACACAA | | | | | |
| cov_104.456856 | | TAGTTGATGTATAATAGTTTTTGAACATGAGGGTATG | | | | | |
| RAD_kmer_0001451_1_TGCAGGTTTTTTTCGCCATCTTAACC | 131 | AGTGTATCTTGAAACTGAACCACCACCTCAGTCGCCAAAAAC | — | T | T | T | GYSNP0430 |
| GAACTCTTGTTTATTAGTTCTTGTTAAGATCAAATATGTTT | | AATTTCCCTGGTTTTAATTAAAGTCACAACGTGCGCAC[G/T]C | | | | | |
| GTTGAGTTCATTTTTTTTTTTAAA_NODE_1_length_626_cov_ | | ACCTTAGCTTGTTCATTCAGCATATGCATAATCTCATTATGAA | | | | | |
| 102.544731 | | TAGAAGCTGACAGCAGACATGGTTTTGCCTAGCATT | | | | | |
| RAD_kmer_0001455_1_TGCAGGTTTTCACATCGTGGATGCA | 155 | GACAATAGTTGCGGTCCTGCTGCAAAATCTTGTATTACATGG | — | G | T | K | GYSNP0431 |
| CCTTTGTGTAGTTCGTTTATTTGCCGATAGCATTTTGAGAT | | GCAACGAGTATGGATACATATCTGAATATGGGAGTTTC[T/G]T | | | | | |
| ACGGGCTACCCCCATCCTTTTTGGC_NODE_1_length_408_cov_ | | GGGTGAGTCAAGTAAACGTTAAGTTAATCTTTGTCATAAATT | | | | | |
| 156.465683 | | TTGTAATATGTCAATTTGTTTGTATTTATTTTATTTA | | | | | |
| RAD_kmer_0001455_1_TGCAGGTTTTCACATCGTGGATGCA | 306 | ATTTTATTTATACACTTATATAATGTAAATTAAATTTTGCAAC | W | T | T | — | GYSNP0432 |
| CCTTTGTGTAGTTCGTTTATTTGCCGATAGCATTTTGAGAT | | CCGTGAAGTTCACGGGTTATAACCTAGTCATATTATA[T/A]TA | | | | | |
| ACGGGCTACCCCCATCCTTTTTGGC_NODE_1_length_408_cov_ | | AAAAACAATTGTAATCTGGAAATTATTAATTTAATGCCAAAA | | | | | |
| 156.465683 | | AGGATGGGGGTAGCCCGTATCTCAAAATGCTATCGG | | | | | |
| RAD_kmer_0001462_1_TGCAGGATGATGCATATATTTATAT | 170 | AAACTAAGAGCATGTGCAACAGGAACTTCATCGTTTACCTTC | Y | T | Y | T | GYSNP0433 |
| GTGATTATATTCCTTAATTAATATATAAATGAATGTTGGA | | ATACTAGACGATCCTGCTGGCAACAGCTTTATAGAAAA[T/C]C | | | | | |
| CTTATGACATGTAGAAGATTATAGTA_NODE_1_length_612_ | | TGTAACTTTAACTCTGTTGTATTCCTTTTCCTTTTAGCAAGCTA | | | | | |
| cov_151.772873 | | TATCATTTTTTCTTTGTACCATACCAAATGCACAA | | | | | |
| RAD_kmer_0001462_1_TGCAGGATGATGCATATATTTATAT | 324 | TGCACAACACGTGTTGCATTTTGTTAAAATATATGACAACTTT | M | M | M | M | GYSNP0434 |
| GTGATTATATTCCTTAATTAATATATAAATGAATGTTGGA | | GATTTTGTAATAGGTATGTTCCATCCCCAGATCCGTC[C/A]TT | | | | | |
| CTTATGACATGTAGAAGATTATAGTA_NODE_1_length_612_ | | AGCATTGATTTCTACGAGCGAACTCCCGAGCAACAAGCTTC | | | | | |
| cov_151.772873 | | GCTTGGATATCTTGTGGACCAATCACAAACGAGAGA | | | | | |
| RAD_kmer_0001463_1_TGCAGGCAGCTAATCAGTAACAATT | 204 | TACATTCTAATTGGAAAGTCTTATGACATCATATTTACTTGGG | A | G | A | R | GYSNP0435 |
| ATGAAGATATTATAACAGTTGTTTTTTTCCTAAGATTCAA | | CACTCTTTAGGATCCTTGATACTTTTAAAATTCTAGC[A/G]AA | | | | | |
| ATGTTCTTGACATATAGAACCAACAA_NODE_4_length_369_ | | ATTAGACAAGAGTCATTATCTTTCCCTTAAGAGTTCTTTTATC | | | | | |
| cov_33.319782 | | ATCTACCAACTTGATTACATTATTAAAATCTGTTC | | | | | |
| RAD_kmer_0001464_1_TGCAGGGATAAAAATTTCCTCATAT | 189 | ATTTAATTTCAGATTTTCAGTGAACACAAATAGTAAAAGTGA | Y | Y | C | Y | GYSNP0436 |
| TAAGAACAACGTGCTAGTGTGACACATGAAGAATAAATA | | ATGGGAAACGGTGCTTTGCTCTCACATTGTTCTGAAAA[GT]A | | | | | |
| AAAGTGACATCTTCCCATGACAAGTTT_NODE_1_length_295_ | | ATTGTTACCCATAGGATGGTGATGGTGTTTATTGGATGAGTAT | | | | | |
| cov_91.247459 | | CGTTCATACTTCATAGGTTGTTAGATTATATGGCAC | | | | | |
| RAD_kmer_0001465_1_TGCAGGTGATATGTGTATGCTAAAC | 424 | TCTTGCTCATGCTTTAAGAAAATTGAAGTATGTCTACTTTTTT | C | T | Y | Y | GYSNP0437 |
| CAGCATATGTGCTTAAGCTTCTTGTTGATAGTGCAAGGGC | | TATTTCCCAAACTCGTGATTAAATGGTCCGACTGTTT[C/T]TAA | | | | | |
| CTTTTCGTAATATATGATTGCTTCAC_NODE_1_length_539_cov_ | | ACTTACTTTTGTCCAAATTTTTGTACAACTCTGCATCAGGAGG | | | | | |
| 158.651199 | | TACAGTGAAGCAATCATATATTACGAAAAGGCCC | | | | | |
| RAD_kmer_0001467_1_TGCAGGCTGCGGCTTGTTTCTGGTT | 152 | ATTCTAATAAGAAAATTTACTATCTAGAAATATCAGATTACA | W | W | A | — | GYSNP0438 |
| GTTGATGAAGGGGCCTTATTCAAAAAGGCGTACAACGCA | | AAGCAATGATGCAAAAGGAAAGGGACGCTGTCTGAAGG[A/T] | | | | | |
| ATGATCATCATCTGGTGCTCCGAATCG_NODE_1_length_487_ | | GACAGCTAAAAAACAACTTCTTTTTTTTATTTATTTTTTATTTT | | | | | |
| cov_131.576996 | | TTTATAAATCTAAAGTTTTTATTCATATTCTTCACA | | | | | |
| RAD_kmer_0001473_1_TGCAGGCAACAATATTAATCAACAC | 347 | TGTAACATGTAACATCCATTTAATTTTATAGGGGTTGGTTGTT | W | T | W | A | GYSNP0439 |
| TGCTAAACAACAGGACCAACAAATTCTATAACATAAAAC | | GATTCTGCTTTACAAATGGATCAGTCTTCGGGTTCGG[A/T]TTT | | | | | |
| TAATAAATGCAATTAAAGTAATCAAAT_NODE_1_length_532_ | | TGATTACTTATTCAAGCTGTTGATGATTGGGGATTCAGGGGTT | | | | | |
| cov_109.501877 | | GGTAAAAGCTCTCTGTTATTGAGTTTTACTTCTG | | | | | |
| RAD_kmer_0001477_1_TGCAGGCCTAAATTGGTTAACTCTA | 109 | AATCGCTTACAGTTTTAGGTTTGTTTAGTTAGTGTATGTGATG | G | R | A | A | GYSNP0440 |
| GGATACTATGTTTATAGATATTATATCATTGTAATTTATTG | | AGATTTTTTGCCAAGGGAAATGGCACGACCACATGTA[A/G]A | | | | | |
| AACGTGTCTATGGATTCAAAATAAA_NODE_1_length_510_cov_ | | TCGTTGGCAATTGGCATCTTGCCTAGCTTGCATGAGAACACA | | | | | |
| 91.364708 | | TATATAAAAGCGATATACATTTGTTGAAATAAAAGGT | | | | | |
| RAD_kmer_0001479_1_TGCAGGCCTTATTGAATTCTTGGCTT | 290 | ATATATAGATAGATACCAACATATAATAATACTACCATGCGC | K | T | K | G | GYSNP0441 |
| TGACTTTTCAGATTTCTATCTTTAGTTACATTACTCTCAAC | | CACACAGTCTATGGCAACTATTCAACAAATTGTACCGG[G/T]T | | | | | |
| TTTCATGTTGCGGTTTATTAATTT_NODE_length_559_cov_ | | AACTATCCAAGATCTTGTTGAGGCACGTCATTATGAAATTCT | | | | | |
| 122.500893 | | AGTAAATAACAACCCAAGGTAAACCCACCATAATACG | | | | | |
| RAD_kmer_0001491_1_TGCAGGATTGAACAAATATAGCGA | 84 | ACAGTGTTGTCATTACCACCAGAAGCCAGTTTCTGAACCGGT | — | T | T | Y | GYSNP0442 |
| ACAGACGTCAATAGCAAATCATGCCAGGGCAGAAGATTG | | TCAAACTCGCCGGACCCGATTAACGAACCAGGCTCCAT[T/C]G | | | | | |
| AAACAGGTCACTCAGACATCATCCATGA_NODE_1_length_ | | AAGGAGCCCAGGTGACGGAGGTTACCCCAACCGGATGAGCT | | | | | |
| 572_cov_97.919579 | | TGGTCTATCTTTGTGGTGTCCCACCCACCATCTGACCT | | | | | |
| RAD_kmer_0001494_1_TGCAGGCGTTGCATGTGCTTTAACT | 94 | CACTTCATATGGGTCAAACAGGTTGAAAGTCGCTTAATGTGT | R | A | G | A | GYSNP0443 |
| TGGCCCGAATTATATTGCAATGTTGCCTCTAACGTAGATT | | TATTTTAATGTATATAACCTCCTAAATAACAATATTCA[G/A]G | | | | | |
| CTGCCATTACAGCCCTCTTCTCCATT_NODE_1_length_632_cov_ | | AAATTATATTATTAAGGAGATATTATGATTCCTACAATCATAT | | | | | |
| 89.726265 | | TTGATGCGGTMGTATTTTTAGAAAAAATTGAACCC | | | | | |
| RAD_kmer_0001494_1_TGCAGGCGTTGCATGTGCTTTAACT | 166 | AATATTCAGGAAATTATATTATTAAGGAGATATTATGATTCCT | T | T | A | T | GYSNP0444 |
| TGGCCCGAATTATATTGCAATGTTGCCTCTAACGTAGATT | | ACAATCATATTTGATGCGGTAAGTATTTTTAGAAAAA[A/T]TT | | | | | |
| CTGCCATTACAGCCCTCTTCTCCATT_NODE_1_length_632_cov_ | | GAACCCATAACAGAAAATTACAGCATAATTTTATCATATTTG | | | | | |
| 89.726265 | | ACACACGAATTTCAAACTTATTTTCAGTGATATTGC | | | | | |
| RAD_kmer_0001494_1_TGCAGGCGTTGCATGTGCTTTAACT | 294 | CACGAATTTCMACTTATTTTCAGTGATATTGCAATATCATGC | S | G | C | G | GYSNP0445 |
| TGGCCCGAATTATATTGCAATGTTGCCTCTAACGTAGATT | | ACACATTTATTTGAGTTATGTTTATACATGACCATAA[C/G]TA | | | | | |
| CTGCCATTACAGCCCTCTTCTCCATT_NODE_1_length_632_cov_ | | CCATTATTAAAAAGAAGGGTTCTTGATTATAAGTTTTGGTATT | | | | | |
| 89.726265 | | CTACAACTTTGCCCTCATTAACGAAGGTGATAATC | | | | | |
| RAD_kmer_0001515_1_TGCAGGGTAATACTAGGTGTTGTAA | 342 | CTGCAAGTAGAGCTGACATGGCCTTAACTGATGGTTTCTCTCC | — | G | G | K | GYSNP0446 |
| AGAGGGGATTCCTTTGTATTGGATTGCCCCAAGGTGTTAG | | TCCACGTCAGCCACCTCTCCTCCAATTGTCTTCCACA[G/T]TTG | | | | | |
| TTGTTGTGTAGATATTGTTATCTTTC_NODE_1_length_640_cov_ | | CATCCGCGTGGGTCGATAGAACCCCTTGCAGATGCTCTAATC | | | | | |
| 113.334373 | | TTTGTTTCCATCATGTTTATATCATGGGTTCATGT | | | | | |
| RAD_kmer_0001517_1_TGCAGGAGGAGCGGCTGGTCAAAG | 219 | CAAAAAAAAAAGGTCAACTGTGAACAAGAACTAGTGAAAAC | A | — | T | A | GYSNP0447 |
| TACCAGAAGAAGAGGTACAAACATTTTCTATTTAGTTTTT | | CAGCTTCTTAAGGTTGAACCTTTTGCAATTACGAACTCG[T/A] | | | | | |
| CTGACATTTTCTAATGTTTTATGCCAA_NODE_1_length_585_ | | GTTAAGTAAGATTAACACATCAAAATTTTACGATCTTGAAAT | | | | | |
| cov_69.543587 | | CTTGCATGGACCCTTTAAAGTGAAAATAAAAAATCAAA | | | | | |
| RAD_kmer_0001517_1_TGCAGGAGGAGCGGCTGGTCAAAG | 321 | AAAATTTTACGATCTTGAAATCTTGCATGGACCCTTTAAAGTG | G | — | G | A | GYSNP0448 |
| TACCAGAAGAAGAGGTACAAACATTTTCTATTTAGTTTTT | | AAAATAAAAAATCAAACAGCGATAAACAAGAAGAAGT[G/A] | | | | | |
| CTGACATTTTCTAATGTTTTATGCCAA_NODE_1_length_585_ | | ACAATCTATAAAACAACATAAATCAGAATTACCTATACGTTC | | | | | |
| cov_69.543587 | | AATGACACTCTTAGTAATGTAGTTTGATAGCATTTTCC | | | | | |
| RAD_kmer_0001522_1_TGCAGGCACAACCTCACCACCATTT | 525 | GCAAAACAAGTAGAACAAACCAAAAAAAAGAGTTTATTGTT | T | T | Y | C | GYSNP0449 |
| CATTTTGACAACTTTTAACTTTTTTATTTGTCACACTTTGTT | | AAGTGGAAATTGATTCATACTGATTGCTAAAATAATGTT[C/T] | | | | | |
| TTATCGTTACGTCTTAAAACAAAT_NODE_1_length_618_cov_ | | CTACAGTAGAATGTTGGATGATCCATTTGTTTTAAGAC | | | | | |
| 100.579285 | | GTAACGATAAAACAAAGTGTGACAAATAAAAAAGTTAA | | | | | |
| RAD_kmer_0001532_1_TGCAGGAATATGCTGAAGAACAGA | 367 | TAAAATTAAACCGACTGAGCAAAGCAGGTAGACGTGTAAGA | G | C | G | S | GYSNP0450 |
| ACAATGGAACATCCTTTAATGATATGAAATTTATTTCAAA | | GAAAACAGTGAGAGGTGTTCCATTATACAGTAGAAAATA[G/C] | | | | | |
| AAATGGTCACTCTAAAGAACJATTTCT_NODE_1_length_624_ | | CATACAACCAAGTAAGATTATTTTAACTGCACAACCAATTA | | | | | |
| cov_89.689102 | | TGGATACCGTAAAACACATGATAGTCAATATATGATAG | | | | | |
| RAD_kmer_0001535_1_TGCAGGCATAGAGTAGAAACTAAC | 445 | TCGAAGTAAACGTTTGTTTGGTGTTTGTAGAGACTAAGACAC | R | G | R | G | GYSNP0451 |
| ACATACGCACCATGTTCAACTTGGAAGGTGTAACCGTTCC | | ATATTGGACATGGGTCGGAGCATTTCTTCTCCTGATGG[G/A]C | | | | | |
| AGCCACGGCCATTAATGAGGAGCCCAT_NODE_1_length_505_ | | TCCTCATTAATGGCCGTGGCTGGAACGGTTACACCTTCCAAG | | | | | |
| cov_94.184158 | | TTGAACATGGTGCGTATGTGTTAGTTTCTACTCTATG | | | | | |
| RAD_kmer_0001542_1_TGCAGGCCCACCAGCTGCAGCCCAA | 537 | AATACAACAGTCAACAAAGAATACTTCACCCGAAGCGAGAT | T | C | T | C | GYSNP0452 |
| CCACCAAAACTATTGAAGTTTGTGGACACAGTGGAAATG | | CTTCCCTTTATCGATAACAAGTCTAGCACCCGAAACCAC[T/C] | | | | | |
| ACAAGGGGCCCGCAAGAATCACCGGGT_NODE_1_length_607_ | | CAATAACCCGGTGATTCnGCGGGCCCCTOTCATTTCCACTG | | | | | |
| cov_1_17.542007 | | TGTCCACAAACTTCAATAGTTTTGGTGGTTGGGCTGC | | | | | |
| RAD_kmer_0001545_1_TGCAGGTTTTCCGTGGTTACCAAAA | 92 | TATTGTTTTCATGTTCTTGCCTATGCAGAGTGGCTTGTTAATA | G | — | R | A | GYSNP0453 |
| AAAAAGATTAAAAAATAGCAAAATGAAGTTATGACTTTC | | TGTTTACTTCAAAAATTATGACCATTTACGAGCGTAT[G/A]GA | | | | | |
| ATGAAAATCTGTTCAGTTATGAATTAA_NODE_1_length_588_ | | AGTATAGTTAAGGACCTGAAGAGTCCAAACTCCTTTTGGGCC | | | | | |
| cov_76.767006 | | TCGAAAATCAGGTATTCCACAAGAAGTTGATATTCC | | | | | |
| RAD_kmer_0001546_1_TGCAGGATCTGTATTGTCGATGAAC | 392 | ACTGAATTTTTATTTGGCAAAGCGCGTTAGTTGTGGCTAAAC | — | A | C | A | GYSNP0454 |
| CTTATCTGGTAATCAATGAACATAAAAAATTTGTAATTTC | | AAACATGATGTGATAACTTAAAAAAAATATATGTTAGC[C/A]T | | | | | |
| AACAAGAATGGATAGAAGAGAAACAA_NODE_length_491_ | | GCTTACTTCAAAGTGCTCTTCTGTGTTCATCTTTTGTTTCTCTT | | | | | |
| cov_S9.769S59 | | CTATCCATTCTTGTTGAAATTACAAATTTTTTATG | | | | | |
| RAD_kmer_0001555_1_TGCAGGCGCAGTTAACATTAGCACG | 260 | GGGTTTGAATGCCATCCCTATGTAAGAGTTACTAAGAAAGTT | A | T | T | T | GYSNP0455 |
| TTATGCCTCAACACCACTGCTCCTCTTATATATGACAAGT | | TGATTTGATCCATTTACAATATATAAATGATAAGTCTA[T/A]T | | | | | |
| GTTGGTCAGACATAAGATTTATGAAA_NODE_1_length_587_ | | AGTTATCAAGGTTTTACAATTCTAAAATAATTCATAAGGGAT | | | | | |
| cov_90.066437 | | TGCTTAAAGGTTATTCATCTAGCATTTTTTTTATATT | | | | | |
| RAD_kmer_0001565_1_TGCAGGAATATATCACCGATTCACC | 264 | CAAAAATCACCAAAGAGTTATTTTAATGCATACATGTATGCA | T | G | G | G | GYSNP0456 |
| CTCGACACCTCCAACTATATTAAGGTAAAGAGTGCTAGAT | | ACCTCCTAAGTCATTTTATTTAAGAAATTAGATTAGTA[G/T]T | | | | | |
| TGTGAAAAAGGGGTGGGTCAAGCTGG_NODE_1_length_482_ | | GTAATAATTTAGTTTTATAATCATACTTTAACACGCTAATTAT | | | | | |
| cov_96.647301 | | TTATATATATTCACAAGATTTGGACAAAAGGTGTTC | | | | | |
| RAD_kmer_0001565_1_TGCAGGAATATATCACCGATTCACC | 347 | TAATAATTTAGTTTTATAATCATACTTTAACACGCTAATTATT | G | C | C | C | GYSNP0457 |
| CTCGACACCTCCAACTATATTAAGGTAAAGAGTGCTAGAT | | TATATATATTCACAAGATTTGGACAAAAGGTGTTCCC[C/G]GT | | | | | |
| TGTGAAAAAGGGGTGGGTCAAGCTGG_NODE_1_length_482_ | | CAATTCAACCTGACACATACCAATATTACCCATTTTGAGTGA | | | | | |
| cov_96.647301 | | CCGAAACCAATTTGCCCGTTGCCCAACCAGCTTGAC | | | | | |
| RAD_kmer_0001569_1_TGCAGGCCCATTTACTGTTCTTCATA | 307 | TACTTCATGGAGCCTACGTGTAGAAGAAGTGTATTTTAGGGT | — | T | C | C | GYSNP0458 |
| CGACTCAAATTTCTGGCT1TATAACTAAGGGCCTGTTTGTT | | TTTGCATGATGTATAGAAGGTTAGGGGCTGTTTGGCAA[C/T]T | | | | | |
| TCAGCCTCTTAATGGTTCAGATGr_NODE_1_length_457_cov_ | | TCTGAATGGGTAAGTGCTGAACCAGTAAGAGGTCTGAACCAT | | | | | |
| 39.199123 | | TAAGTGCTGAACCAGTAAGAGGTCTGAACCATTAAGA | | | | | |
| RAD_kmer_0001575_1_TGCAGGTCGACTAAAGCTGCTCAAG | 449 | AGTCAAAATTTTGTTTACTGTAAAAATTACACCAGCTTAATTT | Y | C | Y | — | GYSNP0459 |
| AGCCCAATCACAGAGAACCATTAAATACTATAAGGTATTC | | TGTTTAATCATATATTTTGTTTTCTAATTTAATTATC[T/C]ATTT | | | | | |
| CATCTCTCAGCTAACTTTTAGTTGCC_NODE_1_length_570_cov_ | | TCAATAAAGTTACCCATAATCATATCAGTTTCATATATCAAAC | | | | | |
| 1O3.263161 | | ACGAAGTAAGGCAACTAAAAGTTAGCTGAGAGA | | | | | |
| RAD_kmer_0001581_1_TGCAGGGTCTACCCATGGTGGTCTC | 338 | ATCTAATATATTTATAAGAACATCTTTCACTGAATACAAGAG | T | K | K | T | GYSNP0460 |
| ACTCATGTGAGTTTTATTCATATACCTTCATCCACAATTCA | | AACATTATGTGCTAACATGATTCACGATAATGATGTTT[T/G]T | | | | | |
| AATGAAATAACATAGCAACTTAATT_NODE_1_length_569_cov_ | | GTATTCATTTATTCAGTGAAACATCTTGTTATATGTAACTGGT | | | | | |
| 136.351501 | | TTTATAGTATTTATATACTATGAATATATGAAACGA | | | | | |
| RAD_kmer_0001584_l TGCAGGCCCACAGTTGATTCGCTCC | 242 | TGGAGGCATTAAAACGAGGAGAAAAGCCACCGGTAAGTTAA | T | C | C | Y | GYSNP0461 |
| GGGTTTTGGGTCCCACGCTATCAAAGGTCAACATAAACAA | | AAAATGGGTGGGTCAGGTAACGGGTCAAAACGGGTTGGT[C/T] | | | | | |
| GTTAATTAGTGTCTCGGTGAACAATT_NODE_1_length_528_ | | GGTATGGGTTGAGCCACTTACACATGTATGCATTAAAAATAG | | | | | |
| cov_83.071968 | | ACTTTTAATAAATTCCTAATTTTTTTTTTCGAACAACA | | | | | |
| RAD_kmer_0001586_1_TGCAGGTGTAGGCATGGGTATTTCC | 107 | CCGAGTGATGATCAAAACTTTCATAATCGACTCTTTACAACTT | G | G | T | G | GYSNP0462 |
| ACGTTGTAAATAACGATTACACGCACTGGGAAATGTATGC | | ACAACATTAACCTTGAGCAAATAGTAATTACATAGCA[T/G]CA | | | | | |
| TATTGGTGGCAGTGCGGATCCGACTA_NODE_length_629_ | | GGAGAACACTCAAACTTCCCTTTCCCGGTGACTTGATCGTGTT | | | | | |
| cov_75.453102 | | CAAGGCAAGCATATGAGCGAACGAAACAGAGAAAA | | | | | |
| RAD_kmer_0001592_1_TGCAGGATACTAAGAGTACAAAAC | 382 | AAAGCATAGAGACGGAATCAGTTTATTCTCTAAAATGCCACA | G | G | C | G | GYSNP0463 |
| CAAGATGCGTCTAAGAAATCATTCCCTCCTCCCTCTTTCCT | | TATCACAGGAGGTGAATCATTTGCATGAGGGCTCTGAAA[C/G] | | | | | |
| TTGTTTTTTATTGTTAAATAAGTCAA_NODE_3_length_439_cov_ | | ATGTAAGTTTTATTGTAGAAGTGATCACGCTTGCAAATAATCT | | | | | |
| 45.264236 | | TTTCCTCCATCTCTTTTTTTTGTCTCAAACAGATATG | | | | | |
| RAD_kmer_0001595_1_TGCAGGCCAAAAATGATCCAATTGC | 294 | ATGGGTAATTAAATCATATAAAGTACAAATAAATGCCAATGA | A | A | G | G | GYSNP0464 |
| TCCTGATAGAGCAATACCACGTGAAGATATTAAGGTATGT | | ATCTGATCTATGCATTTACTGATTGCAGCAAGTTGCTA[G/A]T | | | | | |
| TCAATGTAGCACAATCATGTGACAAG_NODE_1_length_567_ | | ATCTTGTTGTGTGCCCGATTTTTCATTTTCAAGATGTTGAAGG | | | | | |
| cov_20l.938278 | | AAATCCATGACCATCGGATCGGTCCATGGACATCCA | | | | | |
| RAD_kmer_0001612_1_TGCAGGTTTTGATACCACTAGTTTG | 144 | TTTTAAATTAGGTTAAAAGCTCGTTTACTACACGAGTTGAA | R | G | R | K | GYSNP0465 |
| ATAGAATAATAAGCAGGTTCTCCAATGTTTCACTAAAACA | | TAAAAAAAATATTAAATACTTAGTAATLGAAGATTTTT[G/A, T] | | | | | |
| TTCATTATTACTCATTTCTTATTTTT_NODE_1_length_629_cov_ | | AATTTTAAAAGATATTTATTGATAAGACATTATTTAAATTACG | | | | | |
| 70.653419 | | TATAAGTAAGTAATTTTAATAATAAAATGACTATTGA | | | | | |
| RAD_kmer_0001618_1_TGCAGGAGATTTACTATTTTCTGCA | 313 | GGGAGTCGATGGCCCTGCTACTTGTCGTCGTACAGACAGCGG | A | G | G | G | GYSNP0466 |
| GCTGATGCCTTTTGAAAAAAAAAATATATATATTATTTGC | | GCACACCTCGTCGCTTCTAGTCCGGATTCTGACTTAGAG[G/A]C | | | | | |
| CATGCTGATATACAAGGAGCCCATGT_NODE_1_length_607_ | | GTCCAAAAGTCACCTAGAAGAACGATCTGGATCACTTTTACA | | | | | |
| cov_79.510712 | | CTTAATGGGTTGACTGGTCATCTAGTGGAACCTTCAT | | | | | |
| RAD_kmer_0001619_1_TGCAGGTAGTCGAGATTCTCAAACA | 152 | GTAGATGCAAGCTCACCATTGCTTTTAAGCTCCAAAATGATA | T | K | T | K | GYSNP0467 |
| AGAAAAGGTGGATTTCAAGACTTTTGATATACTCTCGGAT | | TCACATCCTCCAATCAACTCACCTTTATAATAAAGTTG[T/G]G | | | | | |
| GATGAAGTAAGGCAAGGCCTAAAAGT_NODE_length_553_ | | GGAAAGTAGGCCAATTCGAGAACGTTTTTAAACCTTGTCGAA | | | | | |
| cov_113.670883 | | CTTCCTCATCGCTCAAAATGTCAAAAGATCCAAACTT | | | | | |
| RAD_kmer_0001621_1_TGCAGGTTGCTATTAATTCCCTCATT | 325 | GAAAATTGAACTTGTGTTCATATGAAGCTATGTTGCCTTTGGC | R | A | R | — | GYSNP0468 |
| CGGATACTTAGGGACCCATCGCTTTCTAGTTTATCATCAAA | | TCATAGATAGGACAATTAAAGATTAGAACAATGTTTC[A/G]G | | | | | |
| AGGTTGTTGGGTCACTCATGTTTAT_NODE_1_length_558_cov_ | | AATCCCATGCTAAATGAACTAACCTTTGGCAAGTATGGCACG | | | | | |
| 161.360214 | | CAGCCTAGCCCCATTGACTGATCTTGCACAGATAAGT | | | | | |
| RAD_kmer_0001629_1_TGCAGGTGCTATGCCAGAAAAATGA | 383 | TGATCTCAATCGATGTTATGAAAGCCTGGGAGAAGCAAAGTA | C | C | A | C | GYSNP0469 |
| GCATGCTCCTTAGTTAGTTTATCTTCAGTCTTCTGAATAGC | | ATGACACCAAAAACAATCAATTATGTCTCCTTTACGAT[A/C]C | | | | | |
| CACATATTCGAATATATATATATAT_NODE_2_length_479_cov_ | | TCCACGTTCAGCATCAGTTGCTGTTTCCATTTTCCTGGATTGT | | | | | |
| 57.511482 | | CATTTTCACCTCGTGCTTGCCCATCTAATAATAGAT | | | | | |
| RAD_kmer_0001635_1_TGCAGGTATTGAACTGAAGAGAAG | 126 | GTGAAAGCTCATTAAGAAAAGGGGCATGGCTAAATGTTTCAC | G | G | R | — | GYSNP0470 |
| CAAACTGCATATTGCAACAGTTATTGGGTACCTTATCA | | CAATGGGTATTTAACGATGAATCTCAGTTTTTTTCTTA[A/G]TT | | | | | |
| CCCGTCAAGATGAATGGATGTCAGGGT_NODE_length_584_ | | GTGATGGAGATTCTGCCACAAATTTGACGCTAAAACTCATGC | | | | | |
| cov_122.330482 | | TGAATTTCAATATTTATTTTTTTAGTTTTACTAGTT | | | | | |
| RAD_kmer_0001635_1_TGCAGGTATTGAACTGAAGAGAAG | 178 | TTAACGATGAATCTCAGTTTTTTTCTTAATTGTGATGGAGATT | T | T | Y | — | GYSNP0471 |
| CAAACTGCATATTGGAACAGTTATTGGGTAGCTTATCAAA | | CTGCCACAAATTTGACGCTAAAACTCATGCTGAATTT[C/T]AA | | | | | |
| CCCGTCAAGATCAATGGATGTCAGGGT_NODE_1_length_584_ | | TATTTTTTTAGTTTTACTAGTTTTATTCTATTTATAAATA | | | | | |
| cov_122.330482 | | TTTCTGAACTTACACACACACACACACGGAGATA | | | | | |
| RAD_kma_00l642_1_TGCAGGTCAAACCACCGTTTAAAAG | 113 | ATTCGAGTTGCTTGCGAACTCACGAGCCGAGCCATACCTAGC | G | — | S | G | GYSNP0472 |
| ATATTCTCCACGTACCTTATAACTCCATGACAACACCGAG | | TCGAGCTTGGGTCGCTTACAACCAAGCTTTTTTCAAAC[C/G]A | | | | | |
| GGATTGTAAGCTTTGGTGACCGTCAA_NODE_1_length_385_ | | GTCACGAGTTGCGAGCTTCTTTGCAGATATCATGATAAAATA | | | | | |
| cov_120.171425 | | GTTGAGGTGCTATAGGTGTATAACTATGAAATAGAGA | | | | | |
| RAD_kmer_0001643_1_TGCAGGAGGCAGAGGAACTCCGGT | 566 | ATGTAATGGTTCTTAAGAGTTATTTTTGTTTTGTTTTGTTTTGT | G | T | G | G | GYSNP0473 |
| AGCTGCAAAACCAAATAAAGAATAAAAAACTGAGAACTT | | TTTGTTATTTTATAAAGTTCAGTTTTTTTATTTTTT[G/T]TTTTG | | | | | |
| TATAAAATTACAAAACAAAACAAAAAAT_NODE_1_length_ | | TTTTGTAATTTTATAAAGTTCTCAGTTTTTTATTCTTTATTTGG | | | | | |
| 623_cov_74.792938 | | TTTTGCAGCTACCGGAGTTCCTCTGCCTCCT | | | | | |
| RAD_kmer_0001644_1_TGCAGGAGCTCAAGTACCGTGTCAT | 85 | ATACTTGGCTGCAGTAAACCTTCAGGGTGTAAATTTTTTAAA | A | R | R | G | GYSNP0474 |
| AATAAAGTGGCAACCTCGCCTGCGATACAGTGACATGTAC | | ATAAGGTCCACJATCATTATGGAGTCAGATTAATAGCC[A/G]A | | | | | |
| TACTTTGATATTGACAAACATGTAAG_NODE_1_length_434_ | | TTAAGTGGGGCATGTATTTCCGACTCATACGTACACCAATGT | | | | | |
| cov_46.502304 | | TGTGTTGTCTACCTTCATCTAATAAGTTTAAAATTA | | | | | |
| RAD_kmer_0001644_1_TGCAGGAGCTCAAGTACCGTGTCAT | 261 | TGAATACTAATTCAACAATTCGTTTTAGTTTTACCTTGGTATT | G | A | R | A | GYSNP0475 |
| AATAAAGTGGCAACCTCGCCTGCGATACAGTGACATGTAC | | GTGTTACCCTTGATGTAAGAACCATGATTTTTCAAA[G/A]GC | | | | | |
| TACTTTGATAHGACAAACATGTAAG_NODE_1_length_434_ | | ATCATCTTTGTCATACGTGAAAACCATTTATTTCCATGATCAT | | | | | |
| cov_46.502304 | | ATTTCAACAAATGATTATTTTACCAAATTATAGCA | | | | | |
| RAD_kmer_0001644_1_TGCAGGTAAGTATCTTTATAAGTAA | 270 | GTTTGCXGTGAGTGTGCCTGTATATGTTGCAATGCTGACTTGC | S | C | S | S | GYSNP0476 |
| TAGCTAAGTAGTTGACCGAAACACTTTTGATATATTTCTTA | | ATTAGTGAGTTTGTTTGGTGAAGCTAAGTCACTATTA[G/C]TTT | | | | | |
| CTATCCAAAGAAAAAATATTGATTA_NODE_1_length_589_cov_ | | TCTTTTAGCATTATTGGAACATAAAAAGTCACATATTACACA | | | | | |
| 133.755524 | | AGTTACTGTATTGTGTAAAATTGAGTTATGATATT | | | | | |
| RAD_kmer_0001647_1_TGCAGGTAAGTATCTTTATAAGTAA | 323 | TTGTTTGGTGAAGCTAACTCACTATTAGTTTTCTTTTAGGATT | R | R | R | G | GYSNP0477 |
| TAGCTAAGTAGTTGACCGAAACACTTTTCATATATTTCTTA | | ATTGGAACATAAAAAGTCACATATTACACAAGTTACT[G/A]TA | | | | | |
| CTATCCAAAGAAAAAATATTGATTA_NODE_1_length_589_cov_ | | TTGTGTAAAATTGAGTTATGATATTTTCTTAACTTTGTAGATA | | | | | |
| 133.755524 | | ATAAACTATGGTTTCAGCCTGAATGCACCGGTAGT | | | | | |
| RAD_kmer_0001647_1_TGCAGGTAAGTATCTTTATAAGTAA | 496 | CAAACGGCGCCCAGTCCTCGAGCATTTCATATTGCCATTGCA | C | Y | C | Y | GYSNP0478 |
| TAGCTAAGTAGTTGACCGAAACACTTTTCATATATTTCTTA | | ATTGACTGCCATATGTTTGTTTTTGGAGGGAGACTTGG[C/T]T | | | | | |
| CTATCCAAAGAAAAAATATTGATTA_NODE_1_length_589_cov_ | | CCAAAAGGTTGTTCAACTATCAACCTTTAATCAATATTTTTTC | | | | | |
| 133.755524 | | TTTGGATAGTAAGAAAEATATGAAAAGTGTTTGGGT | | | | | |
| RAD_kmer_0001649_1_TGCAGGTTTTTAAGTTCTTATGGTA | 302 | TTTGGTAGTTGAACAATAAGCAGTTAGAGTAAGAAACAGTAA | T | C | Y | Y | GYSNP0479 |
| AGATGACATTGGTCCCCTCCTCTCTTTATGTAGTCATCCCA | | GTTTATAAGATGTCCCTCTTCCTACAAAAAAACTACAT[C/T]T | | | | | |
| ATATGCATCATTCTTCTTCACTACC_NODE_1_length_543_cov_ | | TCAAAAAACTAAACTTTATCACTACATTAATGATATATTTACA | | | | | |
| 206.773483 | | TATTTAAATTACAAAAAAATAATCAACTACATATAT | | | | | |
| RAD_kmer_0001649_1_TGCAGGTTTTTAAGTTCTTATGGTA | 414 | TGATATATTTACATATTTAAATTACAAAAAAATAATCAACTA | G | C | S | G | GYSNP0480 |
| AGATGACATTGGTCCCCTCCTCTCTTTATGTAGTCATCCCA | | CATATATTAAAACTATAGGTCATATGTGTATATTCAGT[G/C]A | | | | | |
| ATATGCATCATTCTTCTCACTACC_NODE_1_length_543_cov_ | | ATGAATGTATAGCTAGTAAAAATGAATCTAATAGGATAAGGG | | | | | |
| 200.773483 | | GTGTTGAGATGTGTTAGATATGGTAGTGAAGAAGAAT | | | | | |
| RAD_kmer_0001651_1_TGCAGGTAATTGGATCAAATATCGA | 157 | AGATTTGTTAATTCAATTAAGCAACATACGAATTGTGTATAC | T | Y | T | Y | GYSNP0481 |
| CAGGGATAGAATTCCTGGCATTGATATCAGCTTAAATGAT | | ACACATGGATCACCATTCAATAATCAACAGCACAGTGA[T/C]T | | | | | |
| GGTGACACATGGATGTTTGCTGGGCA_NODE_length_456_ | | TACAATGAAACTCAAATAACTTGTAACAATATTGTGTGTAAC | | | | | |
| cov_49.353069 | | AATGCCTCGAGAATCCACATAACTTTATAGTAGTCCA | | | | | |
| RAD_kmer_0001651_1_TGCAGGTAATTGGATCAAATATCGA | 229 | CACAGTGATTTACAATGAAACTCAAATAACTTGTAACAATAT | A | R | R | A | GYSNP0482 |
| CAGGGATAGAATTCCTGGCATTCATATCAGCTTAAATGAT | | TGTGTGTAACAATGCCTCGAGAATCCACATAACTTTAT[A/G]G | | | | | |
| GGTGACACATGGATGTTTGCTGGGCA_NODE_1_length_456_ | | TAGTCCAGATTGGTAGTTTTGTTGATAGAAAATATTAGAAAA | | | | | |
| cov_49.353069 | | TGAAGTTGCTACTTAACAAGTTCTGTATTTGGGACAT | | | | | |
| RAD_kmer_0001655_1_TGCAGGATGTTAATGAAGAGGTGA | 83 | TCTCCAATGCTTCCAACTTCCTTAAAAATCTTTACTCATCCAG | T | T | T | C | GYSNP0483 |
| ACCAACTTATGATAAAAAATTATGATTTTCATAAGTTTGA | | TCTCGTGAAGTAGAGATGTTGTAATAATATATAAGAT[T/C]CC | | | | | |
| TCTCTATCATGAGGACAACTTTTTTTG_NODE_2_length_503_ | | TATAAGAACAATAAATCAAACAATTAGAACAAACATATATA | | | | | |
| cov_59.838966 | | AGGTTATGTGTACATATAAAATGATTTTTCTCTATTA | | | | | |
| RAD_kmer_0001657_1_TGCAGGATGAGCAAAAGATGCATC | 362 | CCTAAAAGGTATTAAACCTGCATTTCTTGATCATACCTGTATT | T | C | T | T | GYSNP0484 |
| CAGTTAGGCGCGTATAATATATAAGGAAGCAAATAGTAA | | TTCTTTCGTTCAAATGTTTAATTCATTGATGTCATTG[T/C]TAC | | | | | |
| AAATGTATGTTAAACAAGTGCATAGGGA_NODE_1_length_ | | TAGAGAAGTCGTGGCAAAGGACTTGGGATGGAATCGGTGTTG | | | | | |
| 580_cov_96.036209 | | ATGATGTTAGTGTTCGCCATTGAAAACCACAAAAT | | | | | |
| RAD_kmer_0001659_1_TGCAGGTCTTTTCATTTCTTTAGTAT | 444 | ATTGAAGTGAGGCTTAGTAAACCTTCATCTTCATGAGCTCCG | — | Y | T | C | GYSNP0485 |
| TATCCCCAGGTTCGCAATTCATCCCTAGTATATTTATAGCC | | ATAATCAGCATCAGTTCCTTGACATTTGATAAAATAGG[T/C]A | | | | | |
| ATTAATAGAGATATATTGTGAAAT_NODE_1_length_551_cov_ | | GGGAATTGAGCACCAACAATCGCTACAACAAGAAAGAAACA | | | | | |
| l09.938293 | | ATTTCACAATATATCTCTATTAATGGCTATAAATATAC | | | | | |
| RAD_kmer_0001660_1_TGCAGGGTGAAGGGAGATAGTCAG | 176 | TCGTTTCGTTAATTGTTTGTAATTACCAGTTAATCGAATTAAG | K | G | K | G | GYSNP0486 |
| TTATAATCTCAGAGGCTAAGTTGAAGGATATGATATTGGG | | TGGATTTCATGTTCGTTGCCTAAGGTGTAACTCTTAC[T/G]GGT | | | | | |
| GAATTTGCTTGTTATGGTATATATGGT_NODE_1_length_497_ | | CACATCTCAGTCAATAGCGTTAAGTTATCGAAACCGTACACA | | | | | |
| cov_66.388329 | | TAAATCCAACATATATATACTTTATAAATAAAAGA | | | | | |
| RAD_kmer_0001660_1_TGCAGGGTGAAGGGAGATAGTCAG | 355 | TAATTAGAGATTTAGACACAATTCAAAAGGTCAATCTAAATC | M | C | M | C | GYSNP0487 |
| TTATAATCTCAGAGGCTAAGTTGAAGGATATGATATTGGG | | ACGTAATCCAACATGTTTTATGATTGTGTTGTCGAACC[C/A]C | | | | | |
| GAATTTGCTTGTTATGGTATATATGGT_NODE_1_length_497_ | | TTACTTTAATTGTTTTTATGGGTAGAATTTGTCTTGTGATTTTC | | | | | |
| cov_66.38S329 | | TAACTGATGATTTTAGCTATAAATTTAGTCTCTTT | | | | | |
| RAD_kmer_0001661_1_TGCAGGGAAATTCCTCTCTOGATG | 381 | TTCTCTAACGCTCTACTGTAAAAATCTATTTGGTTTAATATGC | C | Y | C | T | GYSNP0488 |
| TATGCGAACTGAAGATAAAATCGAGTGTTTCCAGTATGCT | | ATATTATGTTGTTAAGGATTTACGTTTTGTTTTCTTA[C/T]TGT | | | | | |
| TTATCGTCTCCTGGTTTGGAAAGGGA_NODE_1_length_529_ | | TTGCAGATCAAGGAGTCATTTCCATACTCAATAGTAATTCCTT | | | | | |
| cov_136.451797 | | CACCACAAGGAGAATGTATGGTCTTTCCAAAAGG | | | | | |
| RAD_kmer_0001668_1_TGCAGGGGTCAAATGAGTGCTGTTG | 150 | GTTCCCTCAACATGCCTCTGCCAGCTCATCAGCTGGCCCGTTA | C | M | C | M | GYSNP0489 |
| ACCATGTTTGACTGATAACCCTGTTGGCCAGGTAGGATTG | | TTAACCCAACCTCAGTTTATTGATAAACAGCAAGTTC[C/A]TT | | | | | |
| GTGGCTGACCATGAAATGTATTGTTG_NODE_1_length_545_ | | CCCAAAATGAATATAGTGCTGTTCCCAGTGGGGAGAAGGTGC | | | | | |
| cov_136.957794 | | TGCAAGTGGATTATAGTGGGGTCCCACATGATGACT | | | | | |
| RAD_kmer_0001670_1_TGCAGGACTCCCGTCCGCTGCCGTG | 357 | GATAGAATTGATTGATTGTATTCCATGCAATAGGGTTACAAT | T | — | Y | C | GYSNP0490 |
| CCGCCGCTGCGCTACCGCATTGGATGTCTCTTGCATGAGT | | ATATAGAGATAAACCGGGCCGTGGGCTCGATATTAAAA[C/T] | | | | | |
| ACGGGATAAATTAAAAGTTGTGGACT_NODE_1_length_415_ | | CCTAAATACTATATTCTAATACTCCCCCGCAGTCATAGCGGTA | | | | | |
| cov_38.060242 | | GAGAATCAAACGATCAGACTGGAAAACAATAAAAAAA | | | | | |
| RAD_kmer_0001673_1_TGCAGGTTTCTACACCGCCGAGAAG | 315 | CATCACCCAATGCGAATTCATCAAGGCATCATGCGCATCGCG | C | M | C | M | GYSNP0491 |
| GTTTTAATCGCTCTCTGAATACAATTTAGGTTAATTTTATA | | CATTATACGCTCCTGATGTACGCACTTTAAAACCAAGG[C/A]G | | | | | |
| ATTATTATAGATTACTACTTTACTA_NODE_1_length_582_cov_ | | CTTAAGGCGAGGGCTCGAGATAAGCAAAGCGCATAGCAT | | | | | |
| 163.302399 | | AAACATACCATTTTTACAATTTTAGACATGTTATAATC | | | | | |
| RAD_kmer_0001673_1_TGCAGGTTTCTACACCGCCGAGAAG | 481 | TAGGCAGATTAGGCTACTAGCAAAAGAATCTAAACAACATAC | T | C | C | C | GYSNP0492 |
| GTTTTAATCGCTCTCTGAATACAATTTAGGTTAATTTTATA | | GAACAGAGAGCACTAAAATATTAATATTAACGAGCTAT[C/T] | | | | | |
| ATTATTATAGATTACTACTTTACTA_NODE_1_length_582_cov_ | | GGTTCGGTTCGGCTCACAAACAACCCTAGCCATGCCTAGTAA | | | | | |
| 163.302399 | | AGTAGTAATCTATAATAATTATAAAATTAACCTAAATT | | | | | |
| RAD_kmer_0001675_1_TGCAGGACGAGTTTAGCTTCATCCA | 193 | AACCATGCAGGAGCTGTTCTTTACATCAAAAAAGAATTCCAT | T | C | C | C | GYSNP0493 |
| TCTTACCTTTACTGACCAACCACCTCGGAGATTCAGGCAA | | CTAGAAACACAACCGACAATCGAAGGGCTAATCGTGTC[C/T] | | | | | |
| GAAAAACACCGTGAGTACAAAGTACG_NODE_1_length_634_ | | ATGTCACTTATCGGTGCTACAGTGATCACCACGTTCTCGGGAT | | | | | |
| cov_121.167191 | | CCGTGTCAGACGCTATTGGAAGACGTCCAATGCTCGT | | | | | |
| RAD_kmer_0001679_1_TGCAGGCCAAGAAAGTCTGAGATG | 223 | AACATTTCTGGGGTGTGAGTTTGGAGGTCGATTTCTGATAGA | G | A | G | — | GYSNP0494 |
| ACACCACCCAACCGTAGACGTTCTGATTTGTTTGACTCGA | | CGCCTTCTCATTAATTTGTCATACCATGTATCGGAATC[G/A]G | | | | | |
| TAAAATCCCTAAGATTATCATCTCTT_NODE_1_length_553_ | | GTTTTTTCCCATTTGCAACGAGCCCATCGCCATTTGTGGCTTC | | | | | |
| cov_77.719711 | | ACCTTGTTCTGACATCCCGTTCGCTAAGCTTCTACA | | | | | |
| RAD_kmer_0001684_1_TGCAGGATACCCGACTTGCATAC | 189 | AGTTATAAATAAGGTTTGTTGCTAAATAGGTAGAGTTGTAAT | R | G | A | G | GYSNP0495 |
| GACTTTTGCTACACTATACTTCATTGTCATATTCGATGATT | | TTGGTTACTAATTTGAGCATGTATTCAAGTTGGTTGCT[A/G]A | | | | | |
| CTGAAAATGAACTTGCTATACTAGA_NODE_1_length_514_cov_ | | AACCGTGGGAAAATGTGAAGCTTGTGTCTACTTAGCATAGTC | | | | | |
| 130.268478 | | TGCCCTCTTTATTTTCCACCAAGTATAGGATGTTGGT | | | | | |
| RAD_kmer_0001684_1_TGCAGGATACCCGACTTGCATACAA | 338 | TAGGATGTTGGTTTTTTGACCCACATACAGTTTCTAACTCAAA | R | G | R | G | GYSNP0496 |
| GACTTTTGCTACACTATACTTCATTGTCATATTCGATGATT | | AAAGATTAGAGCTAGTTCACGTGTTATAGATTAACAC[A/G]CT | | | | | |
| CTGAAAATGAACTTGCTATACTAGA_NODE_1_length_514_cov_ | | AACATGTTGGTTAATGGCCCATTGGTCGTTAGGCTGCATAAA | | | | | |
| 130.268478 | | GAAAATTATAATTTAAACAAAGAGTAATATAATAAA | | | | | |
| RAD_kmer_0001687_1_TGCAGGCTCTTTGTACTCAAACAGC | 126 | AATCCAGAAAATGTACCATTTCCAACTAATACATTGGCACGT | R | A | G | A | GYSNP0497 |
| TATTATTGCATTGAAAAGGGGATGTAATTGGGAGAAACTT | | AAAAGATTTGATTCCACATCACTTGCAACGTCAGCTTC[G/A]T | | | | | |
| CTCAATCTGCTGAAGAAAAAGGCTG_NODE_1_length_518_ | | TAAGCAAATCCTGAATTCGGGACCACCAACAGTCACTGTTCT | | | | | |
| cov_148.517380 | | TCTTTCTGTCCAAGACAGAAACAATTACAGTCTTGAT | | | | | |
| RAD_kmer_0001688_1_TGCAGGGTACGTGTGAAGAAACCA | 274 | ATAACTGCTTTGCAACCTCTTCCCGACAGACGACATGTTTGGT | T | Y | Y | T | GYSNP0498 |
| GAGTCCCCGTGCACAATCGATAGCGATTTGAAGACGTTGT | | TGGACTTAAGACTGAACATACACACATGAATATACAT[C/T]TT | | | | | |
| ATCCATGTTATAACTTTATCTTTACTA_NODE_1_length_606_ | | AGTTGATCTCTTGCGTTTTGAATTTGAATGGTTTTTTTATTTGA | | | | | |
| cov_132.014847 | | ACAGGGAAGGTGTATAAAGGCGTACTCGCGAATG | | | | | |
| RAD_kmer_0001690_1_TGCAGGACTTATTGTGTATAGCAGC | 162 | GACATGGTGTTTGATCTTGCCTGAAAGTTAGTTAGATATACTT | C | C | A | C | GYSNP0499 |
| AGATCAATCTTTACGGTTCCCTTCCTCCGCTTTTCTATTGA | | TTTTTAGCATATGATATAATACATTATATAATTATAA[A/C]AT | | | | | |
| GGGCATTTTCCGTTATTGAAGGTGA_NODE_3_length_518_cov_ | | CAGGTATTAAATTTTGTTGAATGCACGTTACATCATCAACTTG | | | | | |
| 59.687260 | | TTTTTGCATTTCAGCAACAAGTTGTGCTCCACTGG | | | | | |
| RAD_kmer_0001692_1_TGCAGGAAATGGGCGGTAGATGAA | 521 | TCGGTTTATCTATTCTTTTATATACTTTCCTGTTGTTTCTTTAT | S | C | S | S | GYSNP0500 |
| AGATTATGCACATTCTAGCGCGTGATATCGACCCAAAGGT | | GGTAAGATGAGATCAAGATTCATATGGTCTTACTAT[G/C]TTT | | | | | |
| TATTGATGTTTGGTTTATTAACAACTA_NODE_1_length_621_ | | TCGTATAGAAATGCGGTCATGTTATAGATATATAGTTGTTAAT | | | | | |
| cov_123.280190 | | AAACCAAACATCAATAACCTTTGGGTCGATATCA | | | | | |
| RAD_kmer_0001715_1_TGCAGGTTTTGTAACGGGGAAGAAA | 374 | GTTGTAATTAGTGCAACATGAGATGCACTCTATTTTCAAAAA | Y | — | C | C | GYSNP0501 |
| AGAAGACGTTGTGGAGGGGCAGCCGGACAGTGGTGACTA | | ATATTTACTACTACTACTATACAATCTGAGTACATATC[C/T]AT | | | | | |
| GTAGTAGCGGAGGGTGGCTACGAGGCG_NODE_1_length_515_ | | CATCTCGTATGTATCCGTCTCTCACCAAACGCACCATCACCTA | | | | | |
| cov_113.506798 | | CCAGTGTCCAGTGGCCTGGTCCGCTTGGTCCCGCC | | | | | |
| RAD_kmer_0001719_1_TGCAGGTTGCTAGGCTTCTGATGGA | 114 | AAAAACTAACAAACTCAGAAATACTGGGAAGACACTGTACA | A | G | R | G | GYSNP0502 |
| CACCTGTGTGGCACAGTTTTATCCAACTTTATTTGTTCTAG | | TGAAGTCATGAACAAAGAAAAGATCAAGATCTAAGCAAC[G/ | | | | | |
| CTACTGATATAATGGACATGTTAGG_NODE_1_length_580_cov_ | | A]ACTTCACTAAGTTTAATTGTTACAAACATATAATATACCGA | | | | | |
| 179.853455 | | ATGAAAAATAAGGATAAGGGATTCACATGCGTGGAAGAA | | | | | |
| RAD_kmer_0001719_1_TGCAGGTTGCTAGGCTTCTGATGGA | 396 | TACCAATTGGGCAATTGTCCATGTAATTCTTTCTCCGTCATAA | G | R | G | R | GYSNP0503 |
| CACCTGTGTGGCACAGTTTTATCCAACTTTATTTGTTCTAG | | ACAGTGGTATTTAGTAGTGAAATAATTTCATGATTCT[G/A]TT | | | | | |
| CTACTGATATAATGGACATGTTAGG_NODE_1_length_580_cov_ | | TGCATAGTAAGGTGTGTTTAGAGGCTTCAGACGAAATAAAAA | | | | | |
| 179.853455 | | CCTGATAAAGTGCAAATCTTGGTCCCATCATCTGCA | | | | | |
| RAD_kmer_0001722_1_TGCAGGATTGGAAGGTCAAAACGCT | 246 | GGTTGGAAAAGGACACAGCTGCTACTAAACTCCTCTCCAAAT | A | T | T | T | GYSNP0504 |
| CCGGTGAAGCATTAATCATTTGGCTATGGATTGTCGTTTA | | CCGCATCCCTACTGTGGGGCTAAACAAATTCATTAACG[T/A]G | | | | | |
| TTTTGTTTGTCGGGTATTATCTAGTT_NODE_1_length_426_cov_ | | GTAATCTTTATAGACCCAAACAATTGAAAATGACATTCATTTT | | | | | |
| 93.732391 | | GAGAAACAGAAATGTAACAATAAATGTTCATTTTTT | | | | | |
| RAD_kmer_0001723_1_TGCAGGCCTTCATGTTGGGCTATGT | 480 | TCCTTTTGACGTGGTGAAGACAAGATTACAGACACAGGTATG | G | G | T | G | GYSNP0505 |
| CTCTAAAAGTATTATACACACCATTATATCGGTCTGCACA | | TATTTGTTCAAGTCATTATTGCATTTTTGTTTTGTACG[T/G]GA | | | | | |
| TCCAGGTATCTACACAAAATCCCATT_NODE_1_length_598_ | | CTCAAGGAGCGCTTTTCTTTGCATCGTGTTCCTCACATGAATG | | | | | |
| cov_102.698997 | | AATAAAAAAATGGGATTTTGTGTAGATACCTGGAT | | | | | |
| RAD_kmer_0001726_1_TGCAGGTATATAGCGAAATGGTGGT | 86 | AGAATTGTGAACTTAATGAAGAGCGAAAAGATGTTCGAAT | T | C | T | Y | GYSNP0506 |
| TTTTTTTAAACAAAGTAAATGATAATGGAATTAAGAAAGA | | CGCAGGGAGGCCCCGATTATTCTTTCTCAGGTATAAGCA[T/C]T | | | | | |
| ACATTAATTAAATTACGTACCAGCCA_NODE_1_length_625_ | | TTTATACAATATTCAATCTAACTTTTGTATTTAATTACTGACT | | | | | |
| cov_79.670403 | | GGTGATGATTAATTTAAATTTATGACATGTTATGAT | | | | | |
| RAD_kmer_0001737_1_TGCAGGGAAGCTTATGTGTGACAGG | 122 | AAAAAAGCACATTAGAAAATTAAATATACCTATTTTACAAT | W | T | T | — | GYSNP0507 |
| ATATGAAATCTATATATTTATGGATATTATTATATATATGT | | AAATTTTTATTTAATTAAAAAACAAAAAGTTATAAAAA[T/A]T | | | | | |
| AGTGTTTGATGTGTATATTTTT_NODE_1_length_480_cov_ | | TTTTTTAACTATTGTAACGATTGCTTTGTTAATCTTTTTAAGAC | | | | | |
| 72.418747 | | TAGAGCTGGTAACAAAATTACTTAGAATTCAAATT | | | | | |
| RAD_kmer_0001744_1_TGCAGGAAACCGCCACAATTACCTG | 358 | ATGACATACAATGCTAGGAACTTGCTCTCAAAGCCGCTAATC | R | A | R | A | GYSNP0508 |
| CTACAACACGAACCAGTTCACTTCCATCTGAACCGTTGGC | | GCGCCACAAAATCATCATAATCAGGAAGTTTAGGATGC[A/G] | | | | | |
| TGCAGGGTTGGCGGTAGATGAGAGAA_NODE_1_length_483_ | | CATTACCGCGCCGACCCAAACCCGACTCCGCCTGATAAGTAG | | | | | |
| cov_83.385094 | | CTGCCCTTGCAAGCCCTTTTCTCTCATCTACCGCCAAC | | | | | |
| RAD_kmer_0001749_1_TGCAGGGAGAAGTGTCTAGAAGAT | 104 | TCCTATTTTGACTTTTAAAGTCTTTCACTCGCAACTTTGACCG | A | T | A | — | GYSNP0509 |
| AACTGCCCGATATGCCATGAATACATCTTCACATCGAAGG | | TAAATTATTTTGATTGTGTTATATAATATTTGATGTA[A/T]AAT | | | | | |
| ATCCTGTGAAGGCCCTTCGGTGTGGTC_NODE_1_length_255_ | | ATATGGATAGATTGAGTTTTAGATGTATTTTTCATTGATATAA | | | | | |
| cov_9.403921 | | CTTTCATTGGATATTATATCATACAAACAAAAAT | | | | | |
| RAD_kmer_0001753_1_TGCAGGGAATTTTCTTTTATCATTCG | 268 | TTAAAAAAATTGACTGTTTTGTATCATACTTATAAATTATCAA | T | — | T | A | GYSNP0510 |
| ATTTCATTTATGACTTATTTAATGTTTTTTTATGTTCAAAC | | CTTACAAAAAGGATTAAAAGAGTCGGAATGCAGAAAA[T/A]T | | | | | |
| CACGGTCGAGATGAGCCAGCGAAGC_NODE_1_length_586_ | | AGACATACCCCTTAGTGAGGTCTCATTGATCCAGAGGCAACT | | | | | |
| cov_105.817406 | | CATCAGTGGCGGAGCTTGAAAAATTTTTCCAGGGGGC | | | | | |
| RAD_kmer_0001754_1_TGCAGGATGGACTGTGGAAGATAA | 115 | TTTAACCATTAGTCCCATTTCCCATTTAAATCCTTTTCTTCTTT | C | C | Y | T | GYSNP0511 |
| GTTTCGGAAAGGTGGTAACAAAACTGGAATGAAATATAA | | GAACCATTTAAGATAAAATCTACCCTGTAAATGGGT[C/T]AGC | | | | | |
| GGTAAGTATAAAAAAGTTTTACCAATAT_NODE_2_length_360_ | | ATTGCCACCTCTAGCTAACAATATTATAGAAAACACATTATA | | | | | |
| cov_26.025000 | | TGATTAAATAAATACCCAAGATGAAATCGGCAAAG | | | | | |
| RAD_kmer_0001780_1_TGCAGGCCATCAGGAACTAAAGTG | 114 | TTTTCCAAGCCCCACCTAATAAAATAATAAACCAGACCCCCC | C | T | Y | Y | GYSNP0512 |
| GTTATAAAGAAAATACTAGAAAACAAGATGGGTCTGGTT | | TCCCTCTCTTCCCCTATATTAACCAATACAACAAAAAT[C/T]A | | | | | |
| TGGTCTAGAGTTGAAAAAAAGCAAGAAAT_NODE_1_length_ | | CTAAACAACCCTCTGTACAACTCCATATGCACAATGTACA | | | | | |
| 490_cov_165.771423 | | CATCACTGAATAACCATTCACCTGGATTTGGTTATTG | | | | | |
| RAD_kmer_0001781_1_TGCAGGATTGAGCAAATATAGCGA | 457 | TCGTATGAACACGATGCTAGAAGTGAGCCAAACTTGGGGTGA | C | T | C | C | GYSNP0513 |
| GGTAACATACATTAACAGCAAATCATGCCAGGGCAGAAG | | GCCCAAGTAACCTGCCAAACAGGACCGTTATGACCGGT[C/T] | | | | | |
| ATTGAAACAGGTCACTCAGACATTATCC_NODE_1_length_622_ | | AAAGTAGCAAGGGGTACTGAGCTTAGATTGTTTATCTTGATA | | | | | |
| cov_121.982315 | | GTCGCATCAGAGGAGGCAGATGCCACCCGCTTTCCATA | | | | | |
| RAD_kmer_0001788_1_TGCAGGCTAAAACAAGAAAATTAC | 286 | AGAGTAATGTCCTTATACAGGTTGATAACTTGGACATTTTTTT | A | R | R | G | GYSNP0514 |
| ATGAATAAAAGAGAAGATTTCAACCACTCTACCCACTTTA | | AAGGGTTTACTAAAATCCTAAATTTACCCCTTCGAAT[A/G]CT | | | | | |
| CTTTACACTTATTCTTACTCAAATACC_NODE_1_length_620_ | | AAACATACGCATCTATTTAGCAAAAGTAAAAAAGATAACTAA | | | | | |
| cov_123.345161 | | CTCATTTATTTATCAGGGGTTGCCGATTCGAGATAC | | | | | |
| RAD_kmer_0001791_1_TGCAGGTGTTAAATGGGTCATGTTC | 322 | GGCGTGAATTTTTTAACACGACACGAATCTAACATGAAATTC | M | M | A | M | GYSNP0515 |
| ACATGTTGAACCTGAAAATCGTGTCAGACACATAAACCCA | | GTGGGCTTGGGCTTTGTCTAAACAGGTTCGGGTCCTAA[A/C]T | | | | | |
| AACACGACACGAGTTTTAGTGAACTG_NODE_1_length_580_ | | GGGCCGTTTTCAGGTCAAGCTGGCAGATTCACGTGTGGATTA | | | | | |
| cov_118.608620 | | CTTAATCCAATTAAATTTTATACTTATTTTCCAGAAT | | | | | |
| RAD_kmer_0001795_1_TGCAGGTACATAAAGGAAACAAAA | 382 | TATTGACAAATAAATATGAGTTATCGTTCATGTGTAATTCTTT | A | A | W | T | GYSNP0516 |
| TTAGTCTTTGACCCATTATATGCTCCTTTACTACCATAATC | | TTTCTTTCTTCATGTCTGTCTCTCACCTGAAGCATTT[A/T]TGG | | | | | |
| AATAGTAAGCTTGATAATTAAAACAA_NODE_1_length_577_ | | TGCATTTTAAATTTCTTTTGTTTAATTTTTTTAGTCACATTACC | | | | | |
| cov_101.636047 | | TAGATGTTTAAATGCTAAATTTTGTTTTACCTG | | | | | |
| RAD_kmer_0001795_1_TGCAGGTACATAAAGGAAACAAAA | 476 | ATTTCTTTTGTTTAATTTTTTTAGTCACATTACCTAGATGTTTA | A | A | W | T | GYSNP0517 |
| TTAGTCTTTGACCCATTATATGCTCCTTTACTACCATAATC | | AATGCTAAATTTTGTTTTACCTGGTTGTATGAAATA[A/T]GGA | | | | | |
| AATAGTAAGCTTGATAATTAAAACAA_NODE_1_length_577_ | | ATTTAGTTCTGCTGAAGATGCACATGTTGGTGATTGTTTTAAT | | | | | |
| cov_101.636047 | | TATCAAGCTTACTATTGATTATGGTAGTAAAGGA | | | | | |
| RAD_kmer_0001796_1_TGCAGGTCGCTGTTATTAAATCTGA | 332 | TAAGGTGGTTGAGACACTTTGTTTTTCCTAGGATTGAATCACA | A | T | T | T | GYSNP0518 |
| CCCTCTTGAAAGTCTTAAACGTGAACAGTGGGTCGCCATT | | CGCATCGAGACTCATGTACATACAAACATAGTAACAC[T/A]TT | | | | | |
| ACTATCCCCAACCCCCCAGCCGGTCG_NODE_2_length_479_ | | CAAAACTAATAAAATCACCATTATAAATGGCGACCCCTCCCA | | | | | |
| cov_31.256784 | | CTTCTCTTACACATTTGAGCTTTTCAGTACGAGGTT | | | | | |
| RAD_kmer_0001808_1_TGCAGGTTGATAAGTATGAATCTTA | 114 | TCTATCTCTAAAATCAAAATATTAACTTTTTTTAAAAGGCTTA | C | Y | T | Y | GYSNP0519 |
| AATAGTCGCATTCGATCACCTAAAAATTTATAGTCAATAC | | AACGGGTCAACATTTCGACCCACTTTTTAAGACGATT[T/C]GT | | | | | |
| GTATGAGAGGGTTTGTATGTCAGATG_NODE_2_length_340_ | | TCGGTTGACCCATAATATGAGATTACTCTATGTATTTTACACC | | | | | |
| cov_211.202942 | | ATTTTTAACCCTATCCACCTTTCTGAAAATTTCCC | | | | | |
| RAD_kmer_0001809_1_TGCAGGGAAAGATGAAAACAAAAT | 302 | TTGGGCTCGTACAAGTTATTACTGCTAATTGGGCTGCTGTTTA | T | G | G | G | GYSNP0520 |
| TTACCCTCAACTGTTGCCAACAAGTTATGATAACAAACAA | | TTGGTCTATTAGATAGATGTATTTGGAATTGGCTACT[G/T]GA | | | | | |
| AGGTGATATATGAAAACTTTTGTAAGA_NODE_1_length_611_ | | TGAATTGAATTTCAGGTGCTTGTTCCAATTGCTACTGGAACGG | | | | | |
| cov_107.509003 | | AGCCGATGGAGGCTGTGATTGTTATTGACGTGCTC | | | | | |
| RAD_kmer_0001813_1_TGCAGGTATGCATTTGTGTCATTCA | 571 | TGCAATGTGATATGGCAGTTCCAATCGCTTCTTCGCCAATATT | G | S | S | G | GYSNP0521 |
| AGTTATACTGAAATGTCTAAAATGCCCCCCAATTGTACAA | | GCAAGACTATGTAACACAAAATAAGTAAATAAAAACC[G/C]C | | | | | |
| ACTAGCTGAATGTGGATATAAAATGT_NODE_1_length_673_ | | CTCGTAAATTATCTCTTTTTTCATGACAGAAGATATACATTTT | | | | | |
| cov_102.707283 | | ATATCCACATTCAGCTAGTTTGTACAATTGGGGGGC | | | | | |
| RAD_kmer_0001817_1_TGCAGGGTACAGAAGAAACGTGGG | 353 | CGAATTTATTCAAATCACCTGAGGCATCTGCCACGCGTCAGG | T | C | C | C | GYSNP0522 |
| CATCTGCCTTATGAACTCCTCCAAGAAGGTTACTTTCTTGT | | AATATCAAGCCTTGAAGCTGAAAAAATCTTCAAGAATT[C/T]A | | | | | |
| TCTCTGTTTAAAATCTTGAATGCCCA_NODE_1_length_465_ | | AACCCAAATCAGCACAAAACTATAACCAGTTTAAACAAACTT | | | | | |
| cov_153.823654 | | AATATGGGCATTCAAGATTTTAAACAGAGAACAAGAA | | | | | |
| RAD_kmer_0001820_1_TGCAGGCAAGACATGGAACACGTG | 154 | AAACTACTAAACACTGTTGGATAGAACCTGTCTTTCAAAAGT | G | G | K | — | GYSNP0523 |
| CACCTACCAAGAAAAGAATGAGAGATTTGGAAATTTTATC | | AAATCATTTTGGAGACGGATGCCCCTCAAAAGCAGGTT[T/G]A | | | | | |
| CGTTCAGTTAGAATCCCTTTTGCAAAA_NODE_1_length_628_ | | TGTTGTATTTCCTTTTCTTATCTTAATAAAATATACTCTGGGTC | | | | | |
| cov_71.019112 | | CTATCACATATACTAAAATCAAGGAGAGAGGGGAT | | | | | |
| RAD_kmer_0001820_1_TGCAGGCAAGACATGGAACACGTG | 252 | CTTATCTTAATAAAATATACTCTGGGTCCTATCACATATACTA | C | C | T | — | GYSNP0524 |
| CACCTACCAAGAAAAGAATGAGAGATTTGGAAATTTTATC | | AAATCAAGGAGAGAGGGGATATTTGTACAAACAATTA[T/C]A | | | | | |
| CGTTCAGTTAGAATCCCTTTTGCAAAA_NODE_1_length_628_ | | CACTTTTAAAATATGAACAAGAAGCTTGAAACTAGTATACGA | | | | | |
| cov_71.019112 | | TATAATAAAAACCGAACCACATTCAGAAATTTATATG | | | | | |
| RAD_kmer_0001821_1_TGCAGGAGGAGGAGGGATATACAG | 396 | ATTTAATTACACAATTAAACATTCTCAATTATTTAGGAGAGCT | K | T | K | T | GYSNP0525 |
| AAGGTGGTTTTGGAGAGAAGATTGAAGAATTGGTCGTTCA | | AGAATAAGCAATTATAATTTGTTAGTTATGCTAATGC[G/T]TA | | | | | |
| TTTTCAAGTAGTGTTATGTGTTTGTCT_NODE_1_length_647_ | | GGTGAACCTAATCTAATCATATTAATTAAACTTTGCAATTTCT | | | | | |
| cov_85.533234 | | ATATACCTAATTTGTTACAAAGTTATTTCTAAACT | | | | | |
| RAD_kmer_0001828_1_TGCAGGCTTAGTTTTTATAACTACA | 98 | AAGAATATCGTGGATTCTATTAGGGTTGTTAGTTCTTACTCCT | G | — | K | G | GYSNP0526 |
| AATTCAAGGATCAAATAGTTGGTTGAAATTGACAAAAAT | | CCATTTCCAAGGGCAATTGCCATAATAGCAACAACTT[G/T]CA | | | | | |
| GTTGTTGTAGGATCTAGACAAGTTTAG_NODE_1_length_610_ | | TATGAAGCCTAAAAACTTAAAGAATTTTCTCTCCTGTAAATG | | | | | |
| cov_141.614761 | | CCACATCATAAATTCATCACAAATTGAAAATTATCT | | | | | |
| RAD_kmer_0001828_1_TGCAGGCTTAGTTTTTATAACTACA | 178 | GCATATGAAGCCTAAAAACTTAAAGAATTTTCTCTCCTGTAA | C | — | Y | C | GYSNP0527 |
| AATTCAAGGATCAAATAGTTGGTTGAAATTGACAAAAAT | | ATGCCACATCATAAATTCATCACAAATTGAAAATTATC[T/C]A | | | | | |
| GTTGTTGTAGGATCTAGACAAGTTTAG_NODE_1_length_610_ | | AAACAACAAAAAATCTCTACACTCAACTGAGATTTCTTTACA | | | | | |
| cov_141.614761 | | AATTTACACAACAAACGAAAAGAACTATTTACATACT | | | | | |
| RAD_kmer_0001828_1_TGCAGGCTTAGTTTTTATAACTACA | 291 | ATTTCTTTACAAATTTACACAACAAACGAAAAGAACTATTTA | Y | — | C | C | GYSNP0528 |
| AATTCAAGGATCAAATAGTTGGTTGAAATTGACAAAAAT | | CATACTACTCAAATTCAATCGGCCTAATCATTTAGGAA[C/T]T | | | | | |
| GTTGTTGTAGGATCTAGACAAGTTTAG_NODE_1_length_610_ | | TTCATGTTTAATTAGATATACGGTGGCCATGGTGTTAACTTGT | | | | | |
| cov_141.614761 | | CCAAACTGGCCCGTTTTGACACATAGCCAATCGAGC | | | | | |
| RAD_kmer_0001839_1_TGCAGGTTTTTGTATTTTTAGCTGCT | 160 | TAAAACATCTGGTCTAAAGAAAACAAGAAAAACAGTTGTCCT | G | G | R | R | GYSNP0529 |
| GAATATAGTACTCCAAAAAATGCCCTGAATCAGGTATGAT | | GTTTAAAGTATAGAAAAGCTATTGTCAAATCATGTGCT[G/A]C | | | | | |
| TAACGTCTTTCATCCCGTTCCCAAA_NODE_1_length_595_cov_ | | CCATGTTATCATCTGTATGAGGAGTATGACTCTGGCAAGCGA | | | | | |
| 148.584869 | | AAACCAGGAAGAACTAGTTTGTCTGCAAACATCTTAC | | | | | |
| RAD_kmer_0001840_1_TGCAGGTTAGTATGTTACGATTTAT | 148 | AAATAACATCTTTCAAAAACAAAAGCTAAGTGGGCTGGGTGA | G | G | A | G | GYSNP0530 |
| TTTTCACAACAGTAACTTTACCTTCGAATTATAGTAAGAA | | TATGTACCTCCTAGCGACGTAGTCATGCATGGATCCAC[A/G]A | | | | | |
| CTATTTTATATGTTACAAATATTGCA_NODE_1_length_622_ | | TTTCAATTTATTTCTTACTAGGTTATAACCCGTGAACTTCACG | | | | | |
| cov_99.475883 | | GGTTGTCCAATTTATTTATTTAATTCACATAAATTA | | | | | |
| RAD_kmer_0001846_1_TGCAGGATATTCATGTGAGAATGAG | 325 | ATAACAGCATCAGGACTTGGAATACGGAATCCGGATGAGGTT | C | C | C | G | GYSNP0531 |
| GGAAATTTGTGTTTAGAATTGTGTTAAATGGACAGCAAGG | | TACACATGGAAAAAGTCAACTTTCCTTCACCATTGGAC[C/G]A | | | | | |
| CGAATAAGAATGAAGATGAGAATGTC_NODE_1_length_431_ | | AAAAAGCTATATCAACCTCGGAGGAACATGGTGATGGCGCG | | | | | |
| cov_117.626450 | | ACATTCTCATCTTCATTCTTATTCGCCTTGCTGTCCAT | | | | | |
| RAD_kmer_0001847_1_TGCAGGTTGGGAGACTTTTGGGTCC | 172 | GGTGCTGGCAATGTTCCTGAAACCGCTAGCTCAGTCCACTCC | W | T | W | T | GYSNP0532 |
| TGGATACTGGTGAAGCCCTTCAACTATAAAATCTTTAATT | | AATGACACTGTTTAAAAAGCATAAATAATGTGTGTTGA[T/A]A | | | | | |
| AACAAATACAATTGATAAATTTCTTT_NODE_1_length_587_ | | AAAATATATAAGAATCACATTAATGACACAAGTAAAAGAAA | | | | | |
| cov_147.364563 | | AAAGATAGGATTTCAAAGGCAAAATCTTTACTTGTATC | | | | | |
| RAD_kmer_0001849_1_TGCAGGTACATGCTTACTTCATGAA | 397 | CATTAGGCCAAGGGACCCAGTGGGATGGAACAAAATTTAGC | A | C | A | A | GYSNP0533 |
| AAATCTCTTTATTTATTATGCACATTAGCAACTCCTAATTT | | CATTTAGTTTAGAGCTGCTAGTGATGCAAAAGATAAGAG[A/C] | | | | | |
| CATGATAAATAATATTCATCACTCC_NODE_1_length_591_cov_ | | TATTGATTCATGTTATGTAATCAACTATTCAATTACCATCAAC | | | | | |
| 146.766495 | | AAACTGGGTTTCTTTATAGAGACGACGAGTGTGGCAA | | | | | |
| RAD_kmer_0001850_1_TGCAGGAAAAGATTACTCTGTTCAG | 109 | CAAAAAAGGCCTAATACATATACATGAACCCAAACCCTTAAT | A | C | A | A | GYSNP0534 |
| AAGCTGATTCTTGGGACCCACACATCGGAAAACGAGCCT | | TCAGAAAAACATAATAAAAACTGAACCCTATAAAACAC[A/C] | | | | | |
| AATTATTTAATGCTGGCTCAGGTTCAG_NODE_5_length_318_ | | AAAAAGAACAATAATGTTCTTCAAAATATAAAAACACCAACT | | | | | |
| cov_15.776730 | | CAACTATCAGTTTCAATCTCCACAACTACACCTACATG | | | | | |
| RAD_kmer_0001852_1_TGCAGGAAAAGATTACTCCGTTCAG | 117 | AAAAAGCGAGACGTGTCATATGGACCGTATAAGTAGGTGAA | W | — | T | T | GYSNP0535 |
| AAGCTGATTCTTGGGACCCACACATCGGATGATGAGCCTA | | AACGGTCAACTGAGTCGTATGACAGAGCAAAAATGATCA[T/A] | | | | | |
| ATTATCTTATGTTAGCTCAGGTTCAG_NODE_1_length_596_ | | ATGGGCCATATGACTTTGGCGGTGGTCACATCACTCAATCAA | | | | | |
| cov_82.293625 | | ATGCATCCTACGATCATAAGGGCCATGTGGCTTCGCCC | | | | | |
| RAD_kmer_0001855_1_TGCAGGTACATATTCTTATTACCCA | 353 | GCCATGCTAGAGAATTAGTGACTGGTGCCTGGTGGTGGCTTTT | C | A | M | C | GYSNP0536 |
| TCGAGCAACTACTGTGTATATTTAAAATACAGAAGAAAGG | | TGCATAGCTTTTGTATTTTCTTAACTTAACTGGAGTG[C/A]TTT | | | | | |
| GCTCGAGAAATGAGAAAATAAATATA_NODE_1_length_592_ | | ATTGAGGTACTCAGAAACAAGTGCACCATTATCATGGTCAAC | | | | | |
| cov_119.537163 | | AAGAATGAGGATTGCGCTAGGGGCAGCAAAAGGCC | | | | | |
| RAD_kmer_0001857_1_TGCAGGTATATAAATAATCAGTTGT | 271 | CAATCTGGCATCTGCCAATAGAAACCATCCGTGTTGCACAGT | C | Y | Y | Y | GYSNP0537 |
| TAGTCCAAAGTGAGACCCTTGTTTTTGGAAACCCAGTATT | | TGTGGCAGTACTTGAAGAAACCTATTTTTCAGCATGTG[T/C]T | | | | | |
| GCAAGTGGTTAGACACAAAGTGTGAT_NODE_1_length_605_ | | TGCCAACAAATTCCAACTCAAAACTTAATTTCAAACATTTAG | | | | | |
| cov_141.791733 | | ATCAGTTAGTTTGCTATTGCTTATTGTTACTCAGATT | | | | | |
| RAD_kmer_0001858_1_TGCAGGAAAGCTCAATTACAACACT | 531 | CTCATTGCAGATAAAAAGGTTCGAGTGGCCAAGGGATGAGCT | T | G | T | — | GYSNP0538 |
| GCGGGTTATCGATCTTCACCCGGACCTCTAACAAGTGCAT | | GTTCATATGGATAATTAGATCCCTCCCAAGATTTAACC[T/G]T | | | | | |
| CATTCCCCCTCCAAATGAAAAGGTTA_NODE_1_length_590_ | | TTCATTTGGAGGGGGAATGATGCACTTGTTAGAGGTCCGGGT | | | | | |
| cov_73.761017 | | GAAGATCGATAACCGGCAGTGTTGTAATTGAGCTTTC | | | | | |
| RAD_kmer_0001859_1_TGCAGGTTATAACTTGAACTCCATG | 157 | GAATATGAAACTTACTTCTTTTTTCAAGTTACTTGGCCCACCG | T | Y | Y | Y | GYSNP0539 |
| AATCATCACTCACAGAGACTGGTGGCTCTGAAAATTATGT | | AGGAAACACCCTTGTCTGTTCTACCACATCTTGAATA[T/C]TG | | | | | |
| ATTTTGGGCCGAGGTACACAAATGAT_NODE_1_length_438_ | | CAAATCCTTCCTGTCACCAAGTACAAGTCTTGTCTTCTGAAGT | | | | | |
| cov_28.796804 | | GCTTTGAAAAGTTCCGACTGCAACAAAGACAAAGA | | | | | |
| RAD_kmer_0001868_1_TGCAGGAAGCTGATCAAGTTGTG | 265 | TACGGAAGTAAATTTGTACCATATTTGGTTATTGAATTCGATG | A | A | A | G | GYSNP0540 |
| GTTTTCTCATATGAGAGAGGTGAAGCCTGGTATTTATGTC | | ATTTGCATATGAAGAGAAAGCATATGCTATATAAAGA[A/G]A | | | | | |
| ACATACAATGGAGACTTTTTTGATTG_NODE_1_length_613_ | | CATTAAATCTGAATATGAACCTTCAAACCATGGCTCCCTTGA | | | | | |
| cov_130.895599 | | GGTAGATAACTATCACGTTTGACCCACGCAAAACAAT | | | | | |
| RAD_kmer_0001869_1_TGCAGGTAAAACGAAGAACACAAT | 311 | TGAGTTTGTTCATAACTTATTATGATTTTAAGATTTTTTCTTTT | A | T | W | T | GYSNP0541 |
| TGATTAACAAGTCCATTTTAAATTAGTATACCCTTGTTCGT | | CTCTTTAGAGTTACAAATTTGAATTAGTAGTTGCAT[A/T]TTTG | | | | | |
| AATAACAATAGCCGTATGTACCTCAG_NODE_4_length_376_ | | GAAACCAGAGATCATTTTCATAATCCTAAGGTTGACTTCAGT | | | | | |
| cov_27.377659 | | TAAATGGCAATTTAATTAGAAATATTGTATCCAT | | | | | |
| RAD_kmer_0001870_1_TGCAGGAATAAAACTGTAGTTTCTA | 114 | AGAAGGAGGGCTTGAACCTCCGACCTTGTGGTTAACAGCCAC | T | A | T | T | GYSNP0542 |
| CACAAATATATTCCAGTCATTTGTAGGCATTTCTTTATGTA | | ACGCTCTAACCAACTGAGCTATTCCAGCTTTTTAATTT[T/A]GC | | | | | |
| TATTATAGACTCGCAAATTACATCA_NODE_1_length_548_cov_ | | AATGTTTAAACATAAATATATTCTTTTACCTAAAAAGTGAGCT | | | | | |
| 83.735405 | | ATTCCAGCTTTTCAATTTTTTTTTTTTCTCTTTTT | | | | | |
| RAD_kmer_0001870_1_TGCAGGAATAAAACTGTAGTTTCTA | 390 | ATGAACATTGAATAAATAGTTTTCTAAAATTTCTTCTTGTCAC | C | C | C | T | GYSNP0543 |
| CACAAATATATTCCAGTCATTTGTAGGCATTTCTTTATGTA | | ATCTTCAGGAAGAATGTCGAGATACCAATTTTGCAAT[C/T]TA | | | | | |
| TATTATAGACTCGCAAATTACATCA_NODE_1_length_548_cov_ | | GGGCAAGAGTTGAAGCTCGGCTGAATTATTTATGTCCTCAGT | | | | | |
| 83.735405 | | TTTTCCCAGCTCCAGGTTTTTGGTCTCCTGAACAAC | | | | | |
| RAD_kmer_0001874_1_TGCAGGACAAAACATCTCTGCCTTA | 96 | GTTTGTCCTTTCAAAAAATGATACATAATTAAGGCTTTAATTA | G | — | G | K | GYSNP0544 |
| TGAACCGGTCTACAGTGACGATCAAGCAAGGTGATTCCCT | | TATCAACAAAAGCAATGTCATTACAATTACAATCTTT[G/T]TT | | | | | |
| TTCCATTTTTGCCCTTGTCTTGATTT_NODE_1_length_514_cov_ | | TTGAACTAAACCTATTTGGGAATCTTTCAACCCGTCTGACATG | | | | | |
| 89.568092 | | TTCCCCTTTTATATAAATCTTTTGACTCGACATTG | | | | | |
| RAD_kmer_0001875_1_TGCAGGTCAAAAGGGTTATGTTATA | 227 | AGCACGAAAAGACCCCAATAAATATTCATCTATCGATGCCTA | W | T | A | T | GYSNP0545 |
| TCTCTATTGGGTCAAACAGGTAAAATAAGAATTAAAAAA | | ATACCATAGATTGTAGTCCGATACTCTCTGTAAGTACC[A/T]T | | | | | |
| AAATATTTAAAAGGAATGGGGTGAACG_NODE_1_length_363_ | | CTAAAATTTTGTTATTATTTATCAATATTATACCATGCTCACT | | | | | |
| cov_49.316803 | | ACTCACTAGAGGTGGCAAAACGGGCAGGCGAGTATT | | | | | |
| RAD_kmer_0001875_1_TGCAGGTCAAAAGGGTTATGTTATA | 300 | AAGTACCATCTAAAATTTTGTTATTATTTATCAATATTATACC | C | T | C | C | GYSNP0546 |
| TCTCTATTGGGTCAAACAGGTAAAATAAGAATTAAAAAA | | ATGCTCACTACTCACTAGAGGTGGCAACGGGCAGG[C/T]G | | | | | |
| AAATATTTAAAAGGAATGGGGTGAACG_NODE_1_length_363_ | | AGTATTTGTATAACATATCAAAAGGGTCTTGGTTTTGTATCCA | | | | | |
| cov_49.316803 | | TTATTCCTTTGGAACTGATCTAAAATACTCTTTTTT | | | | | |
| RAD_kmer_0001877_1_TGCAGGGATGGAGGGTATAGTAAA | 224 | ATCCTAACAATTAATGCACCCAAATCTAAAATGGACCCATAA | T | T | Y | Y | GYSNP0547 |
| TGCAGGAACGGTAAAAATCGTCATTCACCCGCCTGTTATA | | AATTAAATGAAAAAGGCCACCGACAAAAACATTCAATA[C/T] | | | | | |
| GGAGATAATCCTGATGAATTATGCACC_NODE_1_length_578_ | | CACCCTTTCTTTCTATAATCTCAAATATAACTGAATATTGTCA | | | | | |
| cov_152.221451 | | TTTTTTTAGTTAGAAATAGTAGCATAGTTAAAAGGTA | | | | | |
| RAD_kmer_0001877_1_TGCAGGGATGGAGGGTATAGTAAA | 351 | TTTTAGTTAGAAATAGTAGCATAGTTAAAAGGTATATACATT | M | M | C | M | GYSNP0548 |
| TGCAGGAACGGTAAAAATCGTCATTCACCCGCCTGTTATA | | GTCTAATTTGAAGGTGGACTACAGTTATTGGGAAAATA[C/A]A | | | | | |
| GGAGATAATCCTGATGAATTATGCACC_NODE_1_length_578_ | | AGTAAATAGTAAACTTGAGTTGCTTATAGATAATCAAAACAG | | | | | |
| cov_152.221451 | | TAACAAAAAACAAGACATTTGCACAAATTAACAGA | | | | | |
| RAD_kmer_0001882_1_TGCAGGCAATTAGATCCACAATCAC | 107 | GTGCATGTTTGGCTCTCCATTTTTGAGCTCCTTATAACTTATT | K | G | T | G | GYSNP0549 |
| ATCTCGACATCTTAACATCATACGTGCAAAAACAGAACCA | | GACTTAATCAAGAAGTTAATAAGGAGAAAATAATGTT[T/G]G | | | | | |
| ACAAAATGAAATTATCAAATTACATC_NODE_3_length_254_ | | GGTAATGGGTTGAAAAGGAGGTTTTTGTGGGTGGAAAAGGA | | | | | |
| cov_6.118110 | | GATAAGTTATAAGTTAAAATTTGTGACTTATTGATTAA | | | | | |
| RAD_kmer_0001902_1_TGCAGGCTAGGTTGCTTCTATATAT | 87 | AAAATAATATGATTTAATTTGGTTCAAAGAAATCCGAGGAAA | T | — | A | A | GYSNP0550 |
| TGTGTCATCCCGCTGTTATATACATCTACACCAAAAAACG | | ATACAATTCTTTTGGTTACTGATGTCATAAATCATGAT[A/T]TA | | | | | |
| TACACAGAGTAATTGCTTCAATTTAT_NODE_1_length_460_ | | ATCATCTGATATATTAATCTTGTACTCCAAGAGTCAAACAAT | | | | | |
| cov_223.436951 | | AATCCAGATTCTCATCACAAACAAATAACAAACGAT | | | | | |
| RAD_kmer_0001903_1_TGCAGGTATGACTTTATCTGCACTG | 305 | TGATTTTGGAGAAGTTCTTTGACGTGATTCTAAATCTACCAGC | C | Y | Y | T | GYSNP0551 |
| CTATAAATGTACAACTGTGGGCAGCTTGGTTGTCCTGATT | | CGTTCACCAGTAAGTCGATTTACTTGTATAACTAATT[C/T]AA | | | | | |
| TTAGTTGTACTAGTACATTAGATAGC_NODE_1_length_584_ | | TGTCCATATTAAAGGGCGTCTTTGGATGCACATTTCGAAA | | | | | |
| cov_142.339035 | | GTGATTATATGATATTGAAAAACCAGAATCATATAA | | | | | |
| RAD_kmer_0001906_1_TGCAGGGGGTAGCCCATAGGCAGA | 408 | ACTTACGCCACGTGGGCTTCCAAACGAACCTTCATCGTCGGA | C | T | C | C | GYSNP0552 |
| CGGAGGAGTAGGGACGGCGGATGATGGAGATATTGGTGT | | GATACACTCTTTTTTAACTTCACAACTGGATTCGATAC[C/T]GT | | | | | |
| TTCAGGAGCGTGGCAGAGTTAGAGACA_NODE_1_length_ | | GGCTGAAGTTATCAATCGGCCATGGAGGACCCATGCAATTC | | | | | |
| 640_cov_76.937500 | | CATCATCACACTCTCACTCAACCCCATTGGCCCTGC | | | | | |
| RAD_kmer_0001907_1_TGCAGGGCAAAGCGAGTAGAGGTT | 126 | GCACGAGGTTACGGGATTCGTGCGCCATGTCAACTCAAGTTT | C | C | A | A | GYSNP0553 |
| TGCTGATAAATGTTATTGTGACTCACTTAAAAATAAGTTT | | ATTTGGTCAACAAGATCATTTTTGTGATTTTCTTGATG[A/C]AA | | | | | |
| TTATTCGAGGTGGCAAGATGGGTGTTT_NODE_1_length_622_ | | AGAATCTAAAAACTCCCTACTTTTGAGCTGTTTTTTCACTTCT | | | | | |
| cov_108.921219 | | TCAGCAGATACTTTTGCATCTTGAAGTTCCTGTTT | | | | | |
| RAD_kmer_0001907_1_TGCAGGGCAAAGCGAGTAGAGGTT | 411 | GTCTACCAACCAAAAAAAAAAAAGACGTTACACATACTTAA | A | A | A | T | GYSNP0554 |
| TGCTGATAAATGTTATTGTGACTCACTTAAAAATAAGTTT | | AAGTAGAGGTTTCAATTTTGACCCGTTTACTTACGAATG[A/T] | | | | | |
| TTATTCGAGGTGGCAAGATGGGTGTTT_NODE_1_length_622_ | | AGTGTGATTTATCTCATACAGGTCAAATAAAATGAATTTGCT | | | | | |
| cov_108.921219 | | AATAGGTGAAACGATCAAATGGGGCAGACGGGTTAAAA | | | | | |
| RAD_kmer_0001908_1_TGCAGGGAAAGAAGGGGTGAGTCC | 329 | ATTTGACAAACTAAAAGTCAGAATTGAAGTGGATTTAGTGGA | G | C | C | C | GYSNP0555 |
| ACTCGCCACGAACATTGTGAAACTTGCCACACATGTTGAA | | AACATAAATCAACTGTAGATGAGTATCCTGAATACAGA[C/G] | | | | | |
| AAGCGGCTGACCATGGGAAAAAGAGGA_NODE_1_length_588_ | | TAAAGAACATCACATTCATGGAGACAGACGACGATGTTCACT | | | | | |
| cov_124.862244 | | ATACTGTTTTCCTATACAAAATCTCTTTTCATTT | | | | | |
| RAD_kmer_0001908_1_TGCAGGGAAAGAAGGGGTGAGTCC | 421 | ACATTCATGGAGACAGACGACGATGTTCACTATACTGTTTTC | T | C | T | Y | GYSNP0556 |
| ACTCGCCACGAACATTGTGAAACTTGCCACACATGTTGAA | | CAATATACAAAATCTCTTTTCAAATTTCAACACATGTT[T/C]A | | | | | |
| AAGCGGCTGACCATGGGAAAAAGAGGA_NODE_1_length_588_ | | AATTACTGTCGGGCATTTGCCGTGTGCAACACATCCTTTAAG | | | | | |
| cov_124.862244 | | ACAGCAGCAATTCTATCGGCCATGTGTCGTTCTAGAA | | | | | |
| RAD_kmer_0001910_1_TGCAGGTCATCACCGAAGAACGAAT | 575 | AAAACAATTAAAAAAAGAAGATTTGTGTATGCAAGATGTGTG | C | C | M | A | GYSNP0557 |
| ACATATCTTCCTCACATCCTTCTTCTTTCCTGATATAATCA | | TTTATGTGTGTGTTGATGAATGCAGCTCGGCAGATGGG[C/A]T | | | | | |
| GAAGCTAATTTGCACAAATACGGGC_NODE_1_length_659_cov_ | | TTCATGATACTCGAGAATGCCCGTATTTGTGCAAATTAGCTTC | | | | | |
| 134.581177 | | TGATTATATCAGGAAAGAAGAAGGATGTGAGGAAGA | | | | | |
| RAD_kmer_0001917_1_TGCAGGTGCAGAAAATTAGACATTA | 202 | TTTTAAGAGCCTTGCGTCTAGGCCCAAGGCTTGCTCTTTGCGC | — | G | G | K | GYSNP0558 |
| AAAGAAATTGGATGTTTCTTATCTTGATGCATGCTCATGA | | CTTTGACCATCTATATAGTATATACATTATCTACTGG[G/T]AG | | | | | |
| TATAGTCATATATTACAGCTAACAT_NODE_1_length_610_ | | GAGTGACTTATGTATTAGTTTTAAGATGATACCCACACAACA | | | | | |
| cov_87.639343 | | GGTGTAGATTCTAGGTATGATATGAAGACT | | | | | |
| RAD_kmer_0001926_1_TGCAGGTTCTGGCTCATCATCCATC | 271 | ATTCGGAGCCGCTCAACGTATAAATCATGCGGAAATTCTTCA | W | W | A | W | GYSNP0559 |
| AGGACCATCTTGTTTTGTTTTGATGCTTCATGCTATGCACA | | TTTGTAATTTCATCATCTTTCTTTGGGTCGTTCTTAAT[A/T]CG | | | | | |
| ATCACCGTGATACAAATAAATATCT_NODE_1_length_599_cov_ | | CACACTGGATTTTCTAGAAAAAACCTTTCCTAGCCTGCAAGC | | | | | |
| 151.978302 | | ATAAAGACTTAGCATCAAAAAATTCTCTACATAAAA | | | | | |
| RAD_kmer_0001932_1_TGCAGGCTTCCACCTTTGGGCGCT | 85 | TTTTGGTAAATCATCAGACGAGTATGAACTTTGACCTTGATG | G | G | A | G | GYSNP0560 |
| CATGGAGTAAGTGCACAAGCCTCTTTGATTTGAAAT | | ACTTTGACCACTATAACCAACAGGTAAAATATTTACAG[A/G]C | | | | | |
| CATGTTTTAAAATGTATTTTGCATTT_NODE_1_length_608_cov_ | | AAATGATTGACCTGCTAACAACACACAGATGTCATCAGATCC | | | | | |
| 134.911179 | | TAATTAGATAAAAATGTCAAATTACTTGAATTTTTAA | | | | | |
| RAD_kmer_0001937_1_TGCAGGTACAACCAGATCCAAAATT | 340 | TTAGCCATTTGCTGGATAAGTTCCTGCACAAATGATAAACCA | K | K | T | T | GYSNP0561 |
| ACGCTTTCATTCTTCGTTCTCTTTTGTTCCTTTCTTATCATC | | CTTCATTAACATTTGGTCAGATTTGTAACATATGCTCG[T/G]C | | | | | |
| GTGTTGAGAATCATGTTGACGAGC_NODE_1_length_399_cov_ | | AACATGATTCTCAACACGATGATAAGAAAGGAACAAAAGAG | | | | | |
| 215.877197 | | AACGAAGAATGAAAGCGTAATTTTGGATCTGGTTGTAC | | | | | |
| RAD_kmer_0001949_1_TGCAGGCTCCGCTGGGACTTCTTC | 403 | CTTGGTAAGTTACCAAGTTCCAAACATGTAAGTTACCAAGTT | Y | T | C | — | GYSNP0562 |
| TCTGCAGCCCCACCCTCCACCAAATTGTGAGTTATTATTTT | | CCAAAAATACTGTACATTCAACAATATTCAAGTTAATT[C/T]C | | | | | |
| TTTTTTAATTTAATTGAATTGCTCA_NODE_1_length_530_cov_ | | CAAAAACACATGAGCAATTCAATTAACAAAAGCCTCCACAGT | | | | | |
| 88.739624 | | CCACAAATTATAAAACACATGAGCAATTCAATTAAAT | | | | | |
| RAD_kmer_0001950_1_TGCAGGCATCCACTGAAAGGCTGCA | 134 | GATGGCGGGAATTGCTGATTATGCTAGATTTATATTGTAAAC | — | G | R | G | GYSNP0563 |
| GGCATTAGCAGCCTTCAACATGAAGCCAGATGGTCTTAAG | | CAGTACAGCAGCCGCACTCACTACGAGAAGACGGCTTC[G/A] | | | | | |
| CATCTATAACGTTTAGAAATTTTAAT_NODE_1_length_380_ | | TCGTACGACTCAGAGTTCAGCTTCTTTTGGGACGCCATTACCA | | | | | |
| cov_76.800003 | | CACTTCAGAACGGTAGCGTTTTTGTTTCTTCTAATAT | | | | | |
| RAD_kmer_0001950_1_TGCAGGCATCCACTGAAAGGCTGCA | 188 | CGCACTCACTACGAGAAGACGGCTTCGTCGTACGACTCAGAG | — | C | Y | T | GYSNP0564 |
| GGCATTAGCAGCCTTCAACATGAAGCCAGATGGTCTTAAG | | TTCAGCTTCTTTTGGGACGCCATTACCACACTTCAGAA[C/T]G | | | | | |
| CATCTATAACGTTTAGAAATTTTAAT_NODE_1_length_380_ | | GTAGCGTTTTTGTTTCTTCTAATATTTTCTATACTATGAAATTA | | | | | |
| cov_76.800003 | | TGTTCTGATTTGTTTTTTATGCTCTACTTTTCTT | | | | | |
| RAD_kmer_0001957_1_TGCAGGCGGTGCGGCGGGACCG | 208 | CGCCACACACAAATAAATAAACCCTAGCCGTCACCACTTGTG | T | K | G | T | GYSNP0565 |
| TAGTCCAATAGGCGGTGGAGGCGGCGTGGCGGCAAGGAG | | TAAAACCCTAGACAGGGCGGTGTGCCGCCATTGCCGCC[G/T]C | | | | | |
| GCGGCATTACGGAGAAGCGGAATCAATC_NODE_1_length_ | | CGCCCTGTCCAGCCGCTGTTCGTTTTAGTTTCCCGTTCACTTTT | | | | | |
| 643_cov_68.688957 | | CTTTTTCTTATGTCCTGTTCTAAATAAAGTCTCAA | | | | | |
| RAD_kmer_0001957_1_TGCAGGCGGTGCGGCAAGGGACCG | 266 | GCGGTGTGCCGCCATTGCCGCCGCCGCCCTGTCCAGCCGCTG | — | Y | T | C | GYSNP0566 |
| TAGTCCAATAGGCGGTGGAGGCGGCGTGGCGGCAAGGAG | | TTCGTTTTAGTTTCCCGTTCACTTTTCTTTTTCTTATG[T/C]CCT | | | | | |
| GCGGCATTACGGAGAAGCGGAATCAATC_NODE_1_length_ | | GTTCTAAATAAAGTCTCAATTTTCGGTTCTAGATTATATTCCA | | | | | |
| 643_cov_68.688957 | | GCCACGATTCCTAGATCTTTCTAATAAACCATCA | | | | | |
| RAD_kmer_0001957_1_TGCAGGCGGTGCGGCAAGGGACCG | 365 | TCAATTTTCGGTTCTAGATTATATTCCAGCCACGATTCCTAGA | G | K | G | T | GYSNP0567 |
| TAGTCCAATAGGCGGTGGAGGCGGCGTGGCGGCAAGGAG | | TCTTTCTAATAAACCATCATCCATACAATCCTTGTAG[G/T]AC | | | | | |
| GCGGCATTACGGAGAAGCGGAATCAATC_NODE_1_length_ | | GTTTATGGCCCACACCATTAATTTGGGTTTGACTCAACAAAA | | | | | |
| 643_cov_68.688957 | | GTTAAAGTGGATAACAACTGACGGTATCGAAAAATA | | | | | |
| RAD_kmer_0001957_1_TGCAGGCGGTGCGGCAAGGGACCG | 482 | CAACAAAAGTTAAAGTGGATAACAACTGACGGTATCGAAAA | G | K | K | G | GYSNP0568 |
| TAGTCCAATAGGCGGTGGAGGCGGCGTGGCGGCAAGGAG | | ATAGAAGAAACTTCAAGCACGCGGCCAAGCAAGCAGGAG[T/ | | | | | |
| GCGGCATTACGGAGAAGCGGAATCAATC_NODE_1_length_ | | G]AATGTGTTTCCTCCGTCGCAGCCGCTGATCATGATCAAGCC | | | | | |
| 643_cov_68.688957 | | CTTGCCGCTAGTCGTCTTGCTGCTGCTGTTCATCGCAAC | | | | | |
| RAD_kmer_0001959_1_TGCAGGGATCACATCATAAGAAAA | 247 | TTCCATCCGGATGAGGGCCTAATTTGGAGGATGTTTGTTCAAT | W | W | W | T | GYSNP0569 |
| AAATAAAAAATAAAACCCAGTTTGCAACAAAGAAAATCA | | TGCTCTTTGGCTATTCAGATTTCAGATTACGTGTACA[A/T]TAT | | | | | |
| AAACAACTTCGCAGAATACATCACGTGA_NODE_1_length_ | | CAGCATTTTTTCTGGTTATGTTGGATGTCACGCCTTAATGAAT | | | | | |
| 528_cov_106.490532 | | TATGCATTTGTTCTTCTCACAGGGGTTAACACCA | | | | | |
| RAD_kmer_0001961_1_TGCAGGGTTTTGGTCAGCTTGTTTTT | 380 | TTTTATGTTATTGATCTTAATGTAAAGTTGTTAATTATTCGCCT | T | G | T | G | GYSNP0570 |
| GTCAAGTTCCTGCGAGTTCAGGCCAGTTTTGGTGTTGACT | | TCCAATAAACAAATTAGTGAGGTTTCCACTATTAGG[T/G]TTT | | | | | |
| GGACCAAGGCACTAGCCTTGCATGT_NODE_1_length_604_cov_ | | GTACAAGGATTAAAAAAACATTTGCAATGAAAGCGTATACA | | | | | |
| 82.097679 | | ACAAATATCTTAAAAATTTCTGCCAGTGATCTACAT | | | | | |
| RAD_kmer_0001963_1_TGCAGGGATGATAAAAACTACAATC | 478 | TGTAATGTGAGTTGTGAGTCTGTAACAAAATGACAATATATT | R | R | R | R | GYSNP0571 |
| AGATTCAAGACCACATGCATGTTGAAGAGGTTCAATCGG | | TATATTGTTGTATGTGCAACATAAGTCAGTGAGTGTTC[G/A]T | | | | | |
| ATATACAACCTGAGGATTTGTACAA_NODE_1_length_642_ | | AATGAATTGTCCAAATGTGTGTTCGATTTGTGGCAGCTCTAGT | | | | | |
| cov_80.398750 | | ATGCAAAACAATATGTCATATTACTTACCAATGGGT | | | | | |
| RAD_kmer_0001974_1_TGCAGGACTATGAAAATAGCCAAC | 199 | TTATCTGAAAGTTAAAAGCTAATATTTTCTTTTGTTTTTTTAA | C | T | T | T | GYSNP0572 |
| GCCTCCTTACTGGTTAAATTTCAAGGGGTGGGTATTTTAG | | AGGAAAATAAAGATTCAATTAGGAATTCGCGTTGTAA[T/C]GT | | | | | |
| TCAATCTGATCAGAAAAAACACACGAG_NODE_1_length_615_ | | AACGCAACGATACCGTCTATTATAAATTTCTGCTCATAGTTTC | | | | | |
| cov_84.369102 | | TGATCGATTTAAAAACATGTTGATAACCTCCGATG | | | | | |
| RAD_kmer_0001977_1_TGCAGGATAGTGGATCCTAATAAGT | 300 | AAACACATGAGTTGATAAGAATGTGTGAAAGCTCACAGATG | A | — | R | R | GYSNP0573 |
| ATAGAAGATCTTGAATGAAAAAGATGGGACCCGGTCTTG | | GTGACCTCTAATCACTTGGTTCCTTTAAGGTTGTTTCAT[G/A]G | | | | | |
| CCAAGAGAAGCGAAAAAACTAAGGGTT_NODE_1_length_633_ | | ATGGTTTTATTGTTGTCTTTAGTAGAATCCAACAAGAAGGTG | | | | | |
| cov_59.191154 | | AAAGTAGAATGGTTCTCTAATTTTAAGGTACAATAGG | | | | | |
| RAD_kmer_0001983_1_TGCAGGAAAATCCAGATTTATGGAA | 95 | GTTTATGACTTTTGAGAAATCCAACCAAGGAATAATGTTTTTT | A | T | T | — | GYSNP0574 |
| ATGGCTAACTGGGCAGGAACAACCACCTGAACCAATTAA | | TAGGTTATAATAAGAACAGACAAAAGATATAAAAAAA[T/A]A | | | | | |
| CACAAATCCCGTGAGTTACACATCAAT_NODE_1_length_547_ | | AATAAATAAAAAACCAAACCGATCATACTGATGTTTAAATAC | | | | | |
| cov_117.511887 | | AACAATCTGGTCTACTAGAGAGAAAAATACATTATTT | | | | | |
| RAD_kmer_0001983_1_TGCAGGAAAATCCAGATTTATGGAA | 221 | CAATCTGGTCTACTAGAGAGAAAAATACATTATTTAGACCTC | T | T | A | T | GYSNP0575 |
| ATGGCTAACTGGGCAGGAACAACCACCTGAACCAATTAA | | AAAACCATGAGGGCTTTTATACTATAGCAGCCTTATTC[A/T]T | | | | | |
| CACAAATCCCGTGAGTTACACATCAAT_NODE_1_length_547_ | | GGTGCTTATAACATATGAAGTAAACTTATTCGTAAAAAGAGT | | | | | |
| cov_117.511887 | | TGTATATATATAATTACTGATTACCGACAATCGGGCT | | | | | |
| RAD_kmer_0001986_1_TGCAGGAAAAGTAAAACAAATAA | 115 | CAAAGACGCGTTTAACTGCACACGAAGTTTTATGTAAGTTCT | T | T | G | T | GYSNP0576 |
| AAACTTTTTTCTAACGAGCTGCTTCTTCTTTTACTAGATTT | | ACAAATCATTACTTGTATTTGGTAAATCTGAGCTAAAA[T/G]T | | | | | |
| TTAACCATTTGACCCAATATCAATAA_NODE_1_length_589_ | | TCGTTATTTTTACATAATCAATTATGAACTTGTACATTTTTAA | | | | | |
| cov_90.242783 | | AATAATTATGCATTGATTGATATGCCTGTAATAATG | | | | | |
| RAD_kmer_0001988_1_TGCAGGGGCTGGTGGAATACTATTA | 184 | TTTAATAAATGCATTGAGCATGTAAAAAGTTGTTTAAGAGA | S | C | S | C | GYSNP0577 |
| AGTTCAAACTCATCAAGGAAAATGTTATCTTTCACTTTAA | | GGGAATATGCAAAAAAATAATATTGATGATATAGTTCT[G/C] | | | | | |
| CACACTCACCCTGATACACATCGACT_NODE_1_length_560_ | | GTTGGTGGGTCGACTAGGATTCCCAAGGTACAACAAATGCTG | | | | | |
| cov_96.848213 | | AAAGAATTTTTTGACAGGAAACCACTTTGCAAGAGCAT | | | | | |
| RAD_kmer_0001988_1_TGCAGGGGCTGGTGGAATACTATTA | 242 | ATAATATTGATGATATAGTTCTGGTTGGTGGGTCGACTAGGA | R | G | A | G | GYSNP0578 |
| AGTTCAAACTCATCAAGGAAAATGTTATCTTTCACTTTAA | | TTCCCAAGGTACAACAAATGCTGAAAGAATTTTTTGAC[A/G]G | | | | | |
| CACACTCACCCTGATACACATCGACT_NODE_1_length_560_ | | GAAACCACTTTGCAAGAGCATCAAAGCGGATGAAGCTGTCGC | | | | | |
| cov_96.848213 | | TTATGGTGCAGCAGTGTTGTCTGCAAACTTGAGTGGT | | | | | |
| RAD_kmer_0001988_1_TGCAGGGGCTGGTGGAATACTATTA | 475 | GTCCATAGATATATGAGTGCCATAATCCCAAGAAACACGCCA | M | A | M | A | GYSNP0579 |
| AGTTCAAACTCATCAAGGAAAATGTTATCTTTCACTTTAA | | ATACCCACCATGAACGAGATAATTTATGGGACAGATGT[C/A] | | | | | |
| CACACTCACCCTGATACACATCGACT_NODE_1_length_560_ | | GATAACCAAGAATCCATTATAGTCGATGTGTATCAGGGTGAG | | | | | |
| cov_96.848213 | | TGTGTTAAAGTGAAAGATAACATTTTCCTTGATGAGTT | | | | | |
| RAD_kmer_0001990_1_TGCAGGGGTATTTACTCATCAAGAA | 360 | TGCCTATACCAAGAACACGCCTCATTTTATCAACCGCGCCAA | Y | Y | Y | Y | GYSNP0580 |
| GTGTTTTCATCTATTTACAACACCATCAAGCAAGTCTTCA | | AAAAAGATTATAAAACAAATGTATGGAATGTTAGAAA[T/C] | | | | | |
| AATGTAAGTGCTGCAACTTTCTTTAA_NODE_2_length_476_ | | ATAAAACTAACCATAACCCATCCCCATTCGTCAGCAAACGAA | | | | | |
| cov_49.321430 | | GGCACATGGGTCGTGTATGCAACCACATCTGCAATAAA | | | | | |
| RAD_kmer_0002000_1_TGCAGGTAGCAAATAAACCCTAGA | 375 | TTTTGCACTTTGCTAACTCAGGGCAGGTTTGCTGCGCTACGCC | G | K | G | K | GYSNP0581 |
| ATTCAAAATAACAAACACTTAATCAGCCTATAGATTTTGA | | TGGCCTGATCAGGGCGCCTTTGATTACATAGGACTTG[G/T]TA | | | | | |
| CCTAAAAAGATAGAAGGCCAGAGCTTC_NODE_1_length_554_ | | TATTTGATTTATTTGAAGTGGATTTATGCAACCTAGATGTCAT | | | | | |
| cov_83.525269 | | CGAAATGAATGCAATTGGTGAGTGGTGACGCTGGA | | | | | |
| RAD_kmer_0002000_1_TGCAGGTAGCAAATAAACCCTAGA | 493 | GATGTCATCGAAATGAATGCAATTGGTGAGTGGTGACGCTGG | A | M | M | C | GYSNP0582 |
| ATTCAAAATAACAAACACTTAATCAGCCTATAGATTTTGA | | AAGAATTATGCATCTGGATGAAAGATACTTTAGAAGCT[C/A]T | | | | | |
| CCTAAAAAGATAGAAGGCCAGAGCTTC_NODE_1_length_554_ | | GGCCTTCTATCTTTTTAGGTCAAAATCTATAGGCTGATTAAGT | | | | | |
| cov_83.525269 | | GTTTGTTATTTTGAATTCTAGGGTTTATTTGCTACC | | | | | |
| RAD_kmer_0002006_1_TGCAGGAAGTTGGTGATTCACCCAA | 118 | GAATTATCTATTAGTATTATATTTGAATTATCTATATTAGTGT | T | C | C | C | GYSNP0583 |
| ATGGCAACAAGAGTAAAAAAGCCGGAGAATTCTTGTCTG | | TAGGTTTAAATTATGTTTCCTATTGTTTAGATAATTA[C/T]CAT | | | | | |
| TATATCTAGCCATGGCGGACACGAGCG_NODE_1_length_457_ | | TTAGTACTTTTGGAGTTCTAGTAGAATTAGGATAGTGGGCCT | | | | | |
| cov_100.647705 | | ATAAAAGTCTTTGTTTCCTTTGTATTTTTCATTCA | | | | | |
| RAD_kmer_0002010_1_TGCAGGTTATAGATGGGTTCCATAC | 110 | AGTGTGTGATATAACTTGTTGAAAACAAAGTAGTTAAGTAAT | A | M | M | — | GYSNP0584 |
| ACTATGATTTGAAACTGTTTTCAACCTGTTATACCTGATTC | | TATACATTTCATCGTTAGAAGACAAAATCAAATCTCCT[C/A]T | | | | | |
| AAACAGGTCAAAACCCGAAAAAACT_NODE_1_length_637_ | | CACTTTTAGTTATGATATTCCAATCCATACTCTTACATGATCT | | | | | |
| cov_93.921509 | | TTTTATAAATCACAGTATAAAGACATCATGACCATA | | | | | |
| RAD_kmer_0002010_1_TGCAGGTTATAGATGGGTTCCATAC | 241 | AAATCACAGTATAAAGACATCATGACCATATCTTGACTGACC | M | C | C | — | GYSNP0585 |
| ACTATGATTTGAAACTGTTTTCCCTGTTATACCTGATTC | | ACTTCGAACTTCTAAAACAACCTGATGCATTGTGCTCT[C/A]T | | | | | |
| AAACAGGTCAAAACCCGAAAAAACT_NODE_1_length_637_ | | ACAGTAAACTCATGAACAAGACCATTGATCTCAATCCAACTA | | | | | |
| cov_93.921509 | | CACCCGGATTGTGTCTTAAGTTTCAATTTCTCATCA | | | | | |
| RAD_kmer_0002010_1_TGCAGGTTATAGATGGGTTCCATAC | 292 | TTCTAAAACAACCTGATGCATTGTGCTCTCTACAGTAAACTCA | R | G | R | — | GYSNP0586 |
| ACTATGATTTGAAACTGTTTTCAACCTGTTATACCTGATTC | | TGAACAAGACCATTGATCTCAATCCAACTACACCCGG[A/G]TT | | | | | |
| AAACAGGTCAACCCGAAAAAACT_NODE_1_length_637_ | | GTGTCTTTAAGTTTCAATTTCTCATCAGCTTCCTCGTCGTTAAT | | | | | |
| cov_93.921509 | | GAATCTTCCCACTTGTTAATCATCAGGTAAATGT | | | | | |
| RAD_kmer_0002010_1_TGCAGGTTATAGATGGGTTCCATAC | 512 | GCTGCTTCAACTAATTGCAGGTCATGTTTTATTAAACAAGCAT | G | A | R | A | GYSNP0587 |
| ACTATGATTTGAAACTGTTTTCAACCTGTTATACCTGATTC | | TCAGAACAGACCTCGAATAACCACATCTGGTTCCATA[G/A]GC | | | | | |
| AAACAGGTCAAAACCCGAAAAAACT_NODE_1_length_637_ | | ATGTTCTGGATCAACTCCATTGCTTTAATAATATGCCCAACCC | | | | | |
| cov_93.921509 | | AACAAAAAAAGATCAAGTTTTTTCGGGTTTTGACC | | | | | |
| RAD_kmer_0002014_1_TGCAGGCATGTGGAGCCAAAAATGT | 133 | GTTAAAATTAGGGTATTGCTCTTTGCATGATGAGTCTAATTGA | — | A | W | A | GYSNP0588 |
| AGACCTGCAAGCTTTGAGCTCACTAATTAAATAGAACACT | | ATTGGCATAATGATCATGTTTTCTGATTTTTTTTGTT[T/A]TAT | | | | | |
| GATCATCTAGGAAGTAGAATTAAATT_NODE_1_length_581_ | | GTGAACGCCCAATTGCAGTGAGTGTGAGTGTATTCTATCAAT | | | | | |
| cov_80.227196 | | ATGCGTCGGATTGTAGTAAATGAGCGGGTTTACTA | | | | | |
| RAD_kmer_0002018_1_TGCAGGCTATGAGTACAGGGGTCAA | 479 | GGTGATCAAAACCTAGAAAAGAAGCAGAAGTTTTGTATAATT | C | T | T | T | GYSNP0589 |
| ACGGGTCAGGTTTGATAACGGGTCAGAACAGACCGCGTT | | AGGTGCAATTTCAATCCTTTTATATGAAAACGAATCGG[T/C]T | | | | | |
| GACCTGTCACTATTTTTTTTATATAAT_NODE_1_length_631_ | | CAGGCTAGATTTGATTGATAGTGGGTCAAAAGGGTGAAAATA | | | | | |
| cov_152.486526 | | TTATATATTAGTGAAGTTAAATATTTGACAGTATAGT | | | | | |
| RAD_kmer_0002022_1_TGCAGGACTACAGTCCGCCGCCACG | 432 | CCCCGCAGTTGGAGCTGAAGGAAAATAGAAGCTCAAACTGA | G | — | A | G | GYSNP0590 |
| CTACTAGTTAGTTAATTTCTACCCCGCTATCACACCGCCAC | | AATAAAACATAAAAAATAATAATAACAAGATAAACGTGCTTC[A/ | | | | | |
| TTTGCACGCCCCTTACAGGATTACA_NODE_1_length_577_cov_ | | G]GTCGAATCAGTATTCCGTACTTTGCCTACAAATCCATATTT | | | | | |
| 53.542461 | | TGTTTAATTTTTCCATCCATAGCCTTCATAGACAGATCC | | | | | |
| RAD_kmer_0002029_1_TGCAGGACTTCCCGCCCAGGACAAA | 211 | CATATATAATAATAATTATGTAAAGATATATTTGATAAAACA | T | T | C | T | GYSNP0591 |
| CCAGTGCCCCGAAACCCAAACTGGGTACATTCATTTGTTT | | TATATAAATAATAAGCTCGTTTGGGCTTGTTTATTAAA[C/T]G | | | | | |
| CTTTTGTTTCAGTACCTACAAAGGGA_NODE_1_length_574_ | | AGCTCCGATAGGATTAAGCTGATTTAAGTACGGTTCAATTCA | | | | | |
| cov_110.118469 | | AACTTTTAGCGAGCTGATCTTGAGTAGCCCTGTGCTG | | | | | |
| RAD_kmer_0002044_1_TGCAGGAACTAAGGAGGCTGGTGTT | 107 | CTCCAATTTCCATGTAACGAATGATACAGTGAACTACATGGT | C | — | G | C | GYSNP0592 |
| TATGCTTATACATCGGTAACAAATCTGACCATTATCTATC | | TAAAGGTGTATAATACTATGTACGATGAATGGTCCAAA[G/C] | | | | | |
| ATGATCAATCTTTTTTGGATAATATG_NODE_1_length_588_ | | ATCCATCTAAGACACATCCATGTGGGACAAAATCATTGAGAA | | | | | |
| cov_108.025513 | | TGGTACCTCTAGTTTCGTGTTTGTCAAGTCCTAGAGAC | | | | | |
| RAD_kmer_0002047_1_TGCAGGTGCAGATGAACCAAAAGG | 119 | CTCTCAATCCTCTTACTCATACTTCTTGTATGGTTCATACTCCA | Y | C | Y | C | GYSNP0593 |
| CAAAACAACCACACAATTCACAATAAACATATACCTGCC | | CCCCTCCAAACCAGAGTTTGCCCTCAAAGAAGCCGA[C/T]ATT | | | | | |
| AGAAACCCAAGTTCCTACCTTCCACCGG_NODE_1_length_495_ | | TACCAACTCGGCCTCTCAGGATCTCACCTTCTCAACTCATCCA | | | | | |
| cov_138.898987 | | TTCAAATCACTCTTCTTTCAAGAAACCCGAATCA | | | | | |
| RAD_kmer_0002047_1_TGCAGGTGCAGATGAACCAAAAGG | 374 | GAAAACAAGGATACCAATCTTTTATCGATGGTTTTAGTTGCA | K | G | K | G | GYSNP0594 |
| CAAAACAACCACACAATTCACAATAAACATATACCTGCC | | AACGGGTTACCTGTGGACCCATCTTTCGGTTATGAAAT[G/T]G | | | | | |
| AGAAACCCAAGTTCCTACCTTCCACCGG_NODE_1_length_495_ | | GTCGTGATCAAATGGTGGGAAGGTTGGTTTTAAATCTCAAGT | | | | | |
| cov_138.898987 | | CAAATGGTCAACTCCGGTGGAAGGTAGGAACTTGGGT | | | | | |
| RAD_kmer_0002056_1_TGCAGGTACTAATAATAAATCTTGG | 491 | ACAAATAGAGAGAATGAGACATCAAAAGGTTCATTCCTGTAA | M | C | A | M | GYSNP0595 |
| TTTTTATTTATTTTTTATTTTTTTTATTTTTTGGTTAGGGTTT | | ATACCCTTCTTTCCACCACCCATTCTTTGTCTTGCTTA[C/A]AC | | | | | |
| TGTTGATTTGTTTGTAGGCTTTG_NODE_1_length_609_cov_67.059113 | | GCGTCTCTTACTCTTCTTCATCAGTCAGCATCGTCTCTTACAA | | | | | |
| | | GATTAACACAAAGCCTACAAACAAATCAACAAAAC | | | | | |
| RAD_kmer_0002061_1_TGCAGGACACACCACCGGGGCAGG | 208 | GGTGGTGATAATGTGATAATGTTTTTAGATGTTTAAAGAATG | R | A | G | A | GYSNP0596 |
| GTGAAGGACAGCCGCACCTCTCATCACATATAACACCGCT | | ATGGTATTATGATGTACCAACTGACTAAGCATGTTTTT[G/A]G | | | | | |
| TCCTCTCATGTCCGCCATCCTTAATGT_NODE_1_length_553_ | | TGTTTTTAAAGCTCCTTATTATGATGCTCTTATGTATTCTTTGT | | | | | |
| cov_114.037971 | | TAAATCTCATAAAAAACTATTACTTTAATAGTAAA | | | | | |
| RAD_kmer_0002062_1_TGCAGGTCAACAGGCTGCTTCATTT | 411 | ATACTTTTTTTATTTATTTTTTAATTCCGTCTCGCGCTTACGCC | S | S | S | S | GYSNP0597 |
| GTACTTCTTTTGTTTTCCTGCATATACACATTTATTATAAT | | TCGGTTCGCCTCGAGGCTTACGCCTCATGAGGTAAA[G/C]GGA | | | | | |
| CAAGGTTTAAAAGTACAAAAACGAG_NODE_1_length_492_ | | AAACGCCTCGAGGCTCGTTTTTGTACTTTTAAACCTTGATTAT | | | | | |
| cov_90.745934 | | AATAAATGTGTATATGCAGGAAAACAAAAGAAGT | | | | | |
| RAD_kmer_0002063_1_TGCAGGAAGTGCAAGATCATGACTT | 294 | GGAAGGACCTCGTCTTTAGGTTTTAGATCCCCAAAAGATATA | T | T | Y | Y | GYSNP0598 |
| CATGAACCAGTTTCAGATGATGAAACCTTATAACATGGTT | | GTAAAAGTATTGGGAATATCAGGAACCGGCTTTGGTTT[T/C]G | | | | | |
| GGCGACTTCAGTGTCGATTCCTTTTC_NODE_1_length_521_ | | GATTAGGGTTTTCATTCGCTGGAATACTTTGTTTGTTGATCAT | | | | | |
| cov_163.190018 | | ATTGTTGTTCAGTTTATTAGTAGACAGCTTTTTCAT | | | | | |
| RAD_kmer_0002064_1_TGCAGGCGATTATAGATCCTGGAAG | 468 | CAAAGGCTTGTTCCTAATGACCATGGTGAGCAAAACCAGATG | Y | C | T | Y | GYSNP0599 |
| CATTCATCGTTGTATACTAAGAAAGAAGATTCACATGAAC | | TCATGACATTGACTATCCTTAACCTCAACTCTTCTATG[T/C]AT | | | | | |
| GAGACAATAATAAATTTGTTAATCGA_NODE_1_length_574_ | | CCTTTGGGCATATAATATGTTCCACATTTCGAATACATGTCGA | | | | | |
| cov_126.653313 | | TTAACAAATTTATTATTGTCTCGTTCATGTGAATC | | | | | |
| RAD_kmer_0002074_1_TGCAGGACTAGCATCCCTTGGTCGA | 182 | GTTTTTGTGTCTTCTTTTAGTTAAAAGTTAAGTTTATAATCTTG | A | R | G | R | GYSNP0600 |
| TTTTGAGGGCTAGAGTGGTGTTGACCGCTCGTCACCACCG | | AAACACACCATGTATGTTAATTGCATAAAATATATA[G/A]AA | | | | | |
| ACTCACAACTCGTGTCTGTAGTGACG_NODE_1_length_623_ | | GTCTAGACCAGAAAGAATGGATGGTAATCTTTTTCGAGTTTT | | | | | |
| cov_109.593903 | | GATGACTTTTTAAATTAAAAAGTTTATTGTTTGTAT | | | | | |
| RAD_Kmer_0002075_1_TGCAGGTTTTATTGGGATTCTCTGTT | 127 | ATAAACATCATCTTTTTCAATCTTCAGATGAAAAAATGGATTC | Y | Y | C | Y | GYSNP0601 |
| CTTGTTGGTGCTAGTGTTTGGGTGGATCTACTTGTAAGTCC | | AATCACCTTTCTTAGAACACAAAATACCCTAGCAACT[C/T]TA | | | | | |
| CTTATATTTGTTGTAAATGGGTTA_NODE_1_length_633_cov_ | | TATTAATGTTGGGAAATTTATGAGCAACAAGTTTAAAAATAA | | | | | |
| 119.352287 | | CTGTAATACCCAAATATTTGTTATACTAAATTTTCA | | | | | |
| RAD_kmer_0002075_1_TGCAGGTTTTATTGGGATTCTCTGTT | 382 | TCATCATCATCTGATTTCATCAACTGCTGGGGCCGCAAATCTT | M | M | A | M | GYSNP0602 |
| CTTGTTGGTGCTAGTGTTTGGGTGGATCTACTTGTAAGTCC | | ACTTCTGCCGGGCGGGCTACTACAACAGGTTCATCAG[A/C]AA | | | | | |
| CTTATATTTGTTGTAAATGGGTTA_NODE_1_length_633_cov_ | | AGAGGGCTTTGATAAATGGTGGGGTTTTTAGGGGTCGACGTC | | | | | |
| 119.352287 | | CAGTCATTTTCGGATAAACGTCTTCTAGGAAATAGT | | | | | |
| RAD_kmer_0002078_1_TGCAGGTAAAGTTTTTAGGGAATGG | 207 | CCATCGTGTTTTATCACCATCGTGTTAAAACATCACATCTGAA | R | A | R | R | GYSNP0603 |
| GATAAGAACCGAAGACCACCCGATTTTGTACAGTACGGTT | | CCCATTGTGTTTTAAAACTCATGTTAACTACTCATCC[G/A]AA | | | | | |
| CAGGTTTTGGTTTTTTTCGGCCTGGG_NODE_1_length_418_cov_ | | CTTATTGTGTTTTTATCAACCCATTGTGTTTTAAGCTCATGTTA | | | | | |
| 94.956940 | | ACCACACATCTGAACCGATTGTGTTTTAAACTCA | | | | | |
| RAD_kmer_0002081_1_TGCAGGGCCGGCCCAATGGCTATCA | 479 | CAAACTGTTACTAAAACCAAAAAACAGAAACCGAACGGTTT | R | G | G | A | GYSNP0604 |
| AGCTAAGCAATTTCTTTAGGTAGAGGTGAAAAAAACAAG | | TCAAAAACCGAAAACCAAACCGAACAGTGCACACCCCT[G/A] | | | | | |
| GTATTATTGCCTAAGTTAATTTATCCT_NODE_1_length_550_ | | CTATGTAGGATAAATTAACTTAGGCAATAATACCTTGTTTTTT | | | | | |
| cov_127.414543 | | TCACCTCTACCTAAAGAAATTGCTTAGCTTGATAGCC | | | | | |
| RAD_kmer_0002085_1_TGCAGGTGGTACAGAGTACAAGGA | 474 | CTTCCCCTTCCGCCATGAAAGTTCCTTGGGTAATAATTTCCTG | A | G | G | — | GYSNP0605 |
| ACAGTATGTACCTAGAAGATCCTACAACCAAAGAGGCAA | | GCTCTTCAAAGTATTGGTTACGTCCATTCTGGTAGGG[G/A]CC | | | | | |
| TGGCCGCAGCAGCGGTGGTGGTGGTCGT_NODE_1_length_ | | AGCTCTGCCGCCACTGCGACCACCACGCCCATTCCCGTAACC | | | | | |
| 595_cov_103.391594 | | TCTACCACCACCACGACCACCACCACCGCTGCTGCG | | | | | |
| RAD_kmer_0002090_1_TGCAGGCTTGTAAGTGCCTTTTAAC | 237 | AAGTAAAAGATAATAGTATATTTTTCTAAATAATTTATTTTTT | G | — | G | A | GYSNP0606 |
| ACTAGAAACCGAGAACGAAGTCGAGACGTCCAAATCCCA | | ATAGTATATCTACTAAGTAGAGTATTTAAAAGTAAAA[G/A]AT | | | | | |
| TTTCCATGCATCCAATTCTTGTGAGAG_NODE_1_length_585_ | | AATCAAATGGGTTTGGACCTTCCTAACTGCATTAGAGGAGT | | | | | |
| cov_91.158974 | | TGTGGGTAGGGGTGAAAAAAATTCTATTCTGGCTGG | | | | | |
| RAD_kmer_0002094_1_TGCAGGTACAAATTGACTTTAATTA | 258 | AAGCGTGCTAAGTTTTCTCCAGTTTCTAGCAAAACCCACCTGC | R | G | A | G | GYSNP0607 |
| TCCTAGTCGATACTCTCTCTGTTTTGGTCAGTGGCGGAGCT | | CCGAAGGCTCACTGGTGGTATAACCCGAACACCCTCT[A/G]G | | | | | |
| TAAATTTTTTTTGGGAGGCCGAAAG_NODE_1_length_603_cov_ | | ATCGAACTGAAGATCACAAAGATCTCAGTCTTCTTTCACTGA | | | | | |
| 43.467663 | | GCCACCATGCCCCCTCCAAAGTGTTGCCAGTGGGAAT | | | | | |
| RAD_kmer_0002094_1_TGCAGGTACAAATTGACTTTAATTA | 527 | GTCAGTAGTGTAAATTTATGCGTTTTCGTCTGAAAAATTTATA | R | A | G | A | GYSNP0608 |
| TCCTAGTCGATACTCTCTCTGTTTTGGTCAGTGGCGGAGCT | | CGTATTGGCTCCCCTCTCCCCGATTTTAAGGGCTTTA[G/A]GG | | | | | |
| TAAATTTTTTTTGGGAGGCCGAAAG_NODE_1_length_603_cov_ | | GTTTGGTAACTTTCGGCCTCCCAAAAAAAATTTAAGCTCCGC | | | | | |
| 43.467663 | | CACTGACCAAAACAGAGAGAGTATCGACTAGGATAA | | | | | |
| RAD_kmer_0002096_1_TGCAGGTTAAAAGTTCGTGTTAATC | 205 | TCGGGTTTGTCTACGCTTTAACGTAAATTTTGTTTGAAAACGA | G | — | T | T | GYSNP0609 |
| TAGGAAGACCGAATAGATCGATTTTGTTTACAATAAAAAT | | GTCGGTCAAATTATTAAATATCTTTTATGTTCGTTTT[T/G]AGT | | | | | |
| CGTTACCAACCCGACCATTTGTTTTT_NODE_2_length_515_cov_ | | TGTACAACGTTTTGACGTAAATTCTGTTTGGAAACAAATCGG | | | | | |
| 66.182526 | | GTCAAATGTAACATTTTGATTCGATGGTATAAGTT | | | | | |
| RAD_kmer_0002098_1_TGCAGGGCTGCGCATGGGCACCATA | 91 | TAATGATTTTGTTTGAACAGATGTTGGCAGATAAGGAACCTG | T | Y | Y | T | GYSNP0610 |
| GCAGCAACTGATCGAATCGACTGTCCCGCGTCTAGTGAT | | GTGAGAGCATCATTCGTCCTAGCAGCCGTGGACCCTCA[T/C]A | | | | | |
| CGTCAATGTGTCTTTGAAAATACGCC_NODE_1_length_589_ | | CTTGACTTTGACCCTAAAGGTCTATGATGGCGTTTATGCTCAC | | | | | |
| cov_157.558578 | | AAAGATATCACTGAAGGTGGGAAAGAGAATAAAGAC | | | | | |
| RAD_kmer_0002098_1_TGCAGGGCTGCGCATGGGCACCATA | 366 | ATGTTGGCCTATCGGAAGTTTAGAGATGGGGGAAAAGCTGAA | A | W | T | W | GYSNP0611 |
| GCAGCAACTGATCGAATCGACTGTCCCGCGTCTAGTGGAT | | GTTGATGAAATTTTAAGAAAAGAGAAAAATGAAAACCC[T/A] | | | | | |
| CGTCAATGTGTCTTTGAAAATACGCC_NODE_1_length_589_ | | TCAAGAATTGTTTACTCGTTTGGTATATCTCATGAACACCCGG | | | | | |
| cov_157.558578 | | GGACGTTTATTTTAACTTATATAAGGAGTTCAAATCC | | | | | |
| RAD_kmer_0002100_1_TGCAGGGGAATTGTGGTGAACAAA | 139 | CTCCCGGGGATGAGCCGGCCTGTGGTGACGTGGCGGGTGACG | M | M | A | A | GYSNP0612 |
| GCAATTTACATATTGTTGTAGCCCAATATAGAGTAAGAGA | | TAGAGGCCCATCCTCCATCCTCCATCCTCCACACCCCC[A/C]T | | | | | |
| ATAAAGATAGAAACATTGTGCAACATT_NODE_1_length_495_ | | AGCCTAATAAAACAACTCATTAACCAGACCCACTACTTTGAT | | | | | |
| cov_93.856567 | | TAATATCACACATAATAAAACATGTGGCATAAATAAA | | | | | |
| RAD_kmer_0002100_1_TGCAGGTTTACGACCGTTGTGTTTG | 131 | GTTAACGCCAGTAGAAAAATAAATGCCCGAATCCGATTCGCA | A | G | G | G | GYSNP0613 |
| GGTAGAACTCTTTGATGCGGGTCGCCTTTGCAGGGCCCAC | | TATTATTTATTATGGGAGACGAAAAGACAATTTTTAAG[G/A]G | | | | | |
| CCATGGGTCTAAATCTCCCCAGACTA_NODE_1_length_606_ | | ATAGACAAGTACAATCCGTAGATACTCGAATCTGATTTGTGT | | | | | |
| cov_79.212868 | | AGCATTCAATTCTCATTTTTTATTTTTTGCAAGAACA | | | | | |
| RAD_kmer_0002108_1_TGCAGGGTTAGATCCTGTACTTGCT | 483 | CTACTTCTCTTTCTTCAACCTAAGTAATAATTGAAAAGATCTC | C | C | M | M | GYSNP0614 |
| GAAACACTTCCTTCTGGTGTTGCCTATCACCATGCTGGTCT | | ACAAGATTCAAACTTTACAAAATAACATAAAATTTAC[C/A]AT | | | | | |
| CACAGTATGTGCACTACTATCACTC_NODE_1_length_592_cov_ | | CACTAACTGAAAAGGTAAGTGTTTGTGTGTGTTTGTTGTTTGG | | | | | |
| 183.442566 | | AGTGATAGTAGTGCACATACTGTGAGACCAGCATG | | | | | |
| RAD_kmer_0002111_1_TGCAGGATTGACTTTTCCAAACCTT | 150 | ATTATTATATTATATTATACCACAAGTTTTAGCTTAGAGTGAT | W | A | — | T | GYSNP0615 |
| CCTCCTGGTCAACAAAATTTAATTGGAAACATAAAAAGTT | | GAGCATTGAATCCACCATCTTTGTTTTTAGGTTGTGG[T/A]GA | | | | | |
| AAGCAAGGTTGACAAGATAATTATCA_NODE_1_length_484_ | | TAATGGGGACAATGGAGATGTTGCAGATGATCATTATCATAT | | | | | |
| cov_86.400826 | | GTTCTTAGTGAGTCTGTTAATTAAAAACTCCTGTTA | | | | | |
| RAD_kmer_0002115_1_TGCAGGTGATATGTGATCTGTTGTA | 330 | ACCGATTTTAAGTTGGTCTAACCTGTCTTGCCTGTTTTAAGTT | A | — | C | C | GYSNP0616 |
| ACAGTGTAATACTATCACCAAAGTTTAGGAAGCAGTAGG | | CGTCTTACCTGGCTCGACCCATTTCAAGTCATTCTAA[C/A]CC | | | | | |
| AATCCTTCACACCAAGATTCCATGCTT_NODE_1_length_590_ | | GGCCTGACTTGTTTGAACACATGGACCAAAGTTTTTATGGAA | | | | | |
| cov_98.064407 | | CAGTGAAACTAGGAATATCTACTTTGTGCAAAATAA | | | | | |
| RAD_kmer_0002115_1_TGCAGGTGATATGTGATCTGTTGTA | 473 | CTACTTTGTGCAAAATAATCTTATTAATTTTCTAGCAGGCTTT | A | — | A | C | GYSNP0617 |
| ACAGTGTAATACTATCACCAAAGTTTAGGAAGCAGTAGG | | TATCTTATTATATAAGTAATAATTTTATAAAAATCTA[A/C]TAT | | | | | |
| AATCCTTCACACCAAGATTCCATGCTT_NODE_1_length_590_ | | CTTAATGGAGCAGGTGACTTATGCCAAGAGCGAGTGAAGGTG | | | | | |
| cov.98.064407 | | CATTCTCAAGCATGGAATCTTGGTGTGAAGGATTC | | | | | |
| RAD_kmer_0002117_1_TGCAGGCGAACCCAAAGACGCCCC | 341 | AAATCGTGATTTGAAATTAGGAAGTTGAAGTGTAAACTAGGG | G | G | G | C | GYSNP0618 |
| CACCCTCCTAATATTTGAGGAAGCTATGATATATATAAGG | | GGTCGTAACAAAGAGTTGGAAGAGCAATGTTACATATT[G/C] | | | | | |
| CAACGGATTGACTATAGCAGTCTTGCA_NODE_1_length_548_ | | TCGAGTGATGGATGACGAATATATAAGAATTGCATGCCTAGT | | | | | |
| cov_87.182480 | | TTCCTAAACTAATTTTAAGTTTATGTTTGGAGTTAAAT | | | | | |
| RAD_kmer_0002121_1_TGCAGGATCGATTACACGAGGTTAT | 389 | ATAGTTGCTCTTGAACAACAGGTTTCACAAATATCATATGTG | A | A | R | R | GYSNP0619 |
| ATATAAACCAACAACACAAACAAGACACGTTATTAACTC | | CTATGCAAGTTTATTATCTATTATTCGTATTATTATTT[A/G]AA | | | | | |
| ATATGAGTAGAAAAAATTGGAACAAAG_NODE_1_length_593_ | | TTTTGACATATCTTTGTTTGTTAGTTATTAGCTGGTTAGTTTTG | | | | | |
| cov_125.021919 | | TCATTATCTTTTTCATTGTAATCTCTTTACACTG | | | | | |
| RAD_kmer_0002122_1_TGCAGGGTTTGGGACATGCGAAACC | 118 | TCAACTCCATAGCGTCGATAGGCTGCTAGCATTATCAGAACA | C | M | C | M | GYSNP0620 |
| TGTCAAAATCAGTTACAGCTCTTAAGGGCAACATAGGAGC | | AATGACATCTTATAAAATCGCCATGTGACCGCTAAGAA[C/A] | | | | | |
| CATTAGATCTATCCGCTACTCCTCAG_NODE_1_length_603_ | | ACCACCTTAAAAGAGTCAGGAGCAAATAAATGTATGGTACAA | | | | | |
| cov_111.474297 | | ATATATTGTAACATACAACATACATATCTAACCACCAA | | | | | |
| RAD_kmer_0002122_1_TGCAGGGTTTGGGACATGCGAAACC | 215 | CAGGACCAAATAAATGTATGGTACAAATATATTGTAACATAC | T | C | Y | Y | GYSNP0621 |
| TGTCAAAATCAGTTACAGCTCTTAAGGGCAACATAGGAGC | | AACATACATATCTAACCACCAAGAATTCGTAATAACCC[T/C]T | | | | | |
| CATTAGATCTATCCGCTACTCCTCAG_NODE_1_length_603_ | | AAAAATGAGTTCAATGGCCAATTTCTTTGCTAGCTTCTATACA | | | | | |
| cov_111.474297 | | TATCTCCATTATACACATGTTACACAATTTCTATGT | | | | | |
| RAD_kmer_0002122_1_TGCAGGGTTTGGGACATGCGAAACC | 348 | TTATACACATGTTACACAATTTCTATGTATAATTAAAAACCAT | T | C | Y | C | GYSNP0622 |
| TGTCAAAATCAGTTACAGCTCTTAAGGGCAACATAGGAGC | | CTCAAATTAGAGAATCAAAGTAAAAATGTTTGTGCCT[C/T]CG | | | | | |
| CATTAGATCTATCCGCTACTCCTCAG_NODE_1_length_603_ | | TCCCAACTCCAGTAGGCTGCCATATGTACGGTCCCAAACACC | | | | | |
| cov_111.474297 | | GATAAAAAGTGACTCTGTGTCAGGACTAAAAGATGT | | | | | |
| RAD_kmer_0002123_1_TGCAGGTGAAAGATTCAGTGAGATT | 256 | CAATATTCACTATCCGAAATTTTCGGATATCCGGTTTTCGGAT | T | — | T | C | GYSNP0623 |
| GTGGGTAGTCTATACTACATGGTTCTTGAGGTCCTAAAAA | | ATCCGAAAATCGGATAATCCGATCTTGAACACCCCTA[T/C]TA | | | | | |
| GAAATTATGGCCCAGAATTTGATGTA_NODE_1_length_443_ | | CCCTCCACTCCACCCATTATTCCACCCGTAACTTAGTGTAAAG | | | | | |
| cov_99.984200 | | AACTAAAAACCAACCTGCCCAAATCGGCGGGACAC | | | | | |
| RAD_kmer_0002127_1_TGCAGGCGCGCACGGATGACCTGCA | 460 | ATTGGTACTTATTGATCTTTTTCCTATGATTTTTCAACACTATT | G | — | S | G | GYSNP0624 |
| ATTCTTACCATTTGAGAAATAAGTACTAGTTTGTAATTATC | | GTTGATTATGCAACTGTAGGAGCTTCTTCTAAACTT[G/C]CAG | | | | | |
| TCATTTGAGTTGAAAATAATTAGAA_NODE_1_length_575_cov_ | | CCATCCTTGTAACATATCAATTCCAGGTACCAACACTTGGATT | | | | | |
| 137.490433 | | TAATTTCTAATTATTTTCAACTCAAATGAGATAA | | | | | |
| RAD_kmer_0002128_1_TGCAGGAAAGAAAATACAGGAAGA | 192 | TCAAGAATCATTTGGAGAAGTTATTGTTCCAAGATGTTGTTTC | T | T | G | G | GYSNP0625 |
| CGCTATAATCAACGATAACTCAGAATGATGACAAAATAT | | ACTTGTCACCATATTGTAAGTTTCTTTACTTTGACTT[G/T]TTT | | | | | |
| ATGATATTATTATATTTTTACTAACAAA_NODE_1_length_484_ | | AATTTCTCTTTCTTTTGTAATAAAAGTTGTTGACTATTTTCTAT | | | | | |
| cov_89.764465 | | ACATTCATCTTTTATATTCACTAGCTATACCCA | | | | | |
| RAD_kmer_0002134_1_TGCAGGAGATCTTCCCACTGTCGGA | 448 | TCATGATAGCACCATTAATGAAGATAATGAAAATGAGGAAC | A | G | R | G | GYSNP0626 |
| TCATAAACAAGCTGTTGCGGTTGGGTAATGTTGGCTTCAG | | AAGAGGCAATAGTTAAGAGCAACACTCAAGGTATCAATA[G/ | | | | | |
| CCTTTTGCAGCTCAACTGACTCTGTA_NODE_1_length_612_ | | A]CTCAATGATGTTCGACAGTTCTGTAACTGAAAGGAACCCA | | | | | |
| cov_206.130722 | | GGTGTGCATTTACAGTTCTACCATAATCTACCATATATTG | | | | | |
| RAD_kmer_0002135_1_TGCAGGTGTCATAAATAAGCGATGA | 398 | CTAATGAACGGTACGTCTAAGAGTTTGATTTAAAACCCTTCA | T | T | C | T | GYSNP0627 |
| TATCTTAAAAACGTATAGTACAGCTATAAAGGAGTTATTA | | AAACCGGATCGTGAGCCAGCGTCTCTAGCCATTACTCA[C/T]G | | | | | |
| TTTCTTTGTTTTTATTTTATTTTTTA_NODE_1_length_504_cov_ | | TACCATCTCAAAACTAAATAATATTATTAATTATTTTCATTAA | | | | | |
| 96.277779 | | AAAATAAAATAAAAACAAAGAAATAATAACTCCTTT | | | | | |
| RAD_kmer_0002142_1_TGCAGGCTCATGACGGTCGGGAAGC | 311 | AGCCAAACCAAACTATATCACAACACGGGTCGTGAAACCGA | W | — | A | T | GYSNP0628 |
| CACTCAACGGTGAGTGACGGCCACTCGAGTGCGTGTGTGA | | ATCAAAACCCCTTAAAACCAAACCATCAAAAACCCCTTA[A/T] | | | | | |
| TGACCAAATCGTATAAAAAAGGTGTG_NODE_1_length_510_ | | AACCAAACCTTTCACCGTTATTTCAGATCAAACTTCACGTTTT | | | | | |
| cov_108.619606 | | TCAACAACATTATGGTGAAAGATGCTGACGACATCAG | | | | | |
| RAD_kmer_0002143_1_TGCAGGTTACAAATGCTCTACATGG | 529 | ATTTTATATTTTTTTATATATGATATATAAACAAAAAATGGAC | G | T | T | T | GYSNP0629 |
| TCAACATGTTTCTTTTGACAAATGACTGAGACTAGGAAGG | | CCCTCTCTAGAAAACGGACCTTGTGCGGTAATCTGTC[T/G]CT | | | | | |
| AATCCTATACGAAGTTTTATGCTAAG_NODE_1_length_600_ | | AATACTTAGCATAAAACTTCGTATAGGATTCCTTCCTAGTCTC | | | | | |
| cov_66.955002 | | AGTCATTTGTCAAAAGAAACATGTTGACCATGTAG | | | | | |
| RAD_kmer_0002148_1_TGCAGGTTTTGTCATGAGGCCGCAA | 112 | ATTTAACAGTTACGAAATTAGCGGCTTAGATGACTCCCAAAT | — | K | G | K | GYSNP0630 |
| ACAGATTATAAGCTTATTTCACCGTAACGGTAAACTTGTA | | CCCAATGCATAGCACAAAATGGTCACTCTATTTTATCC[G/T]G | | | | | |
| ATTCTAAATCCTCTAAAAATAACGAT_NODE_1_length_565_ | | ACAATTAAATACATGATTTAACTTTTAGTATGCAAACCTCACT | | | | | |
| cov_82.899117 | | CCAAATCCTCAAAATATCCAATCAAAAAAAAAAAAA | | | | | |
| RAD_kmer_0002149_1_TGCAGGAATCAAGCCAACAAAATA | 498 | TGGATGATTCTTCCACCATAGCTTCATTTGACTGAAGGGATTC | G | A | R | A | GYSNP0631 |
| CCGAAAACAATTGGGCTTCTTTGAATGCTAGTACCATTAA | | AGTCTCCATTCTGTCTACAGATGGGCCAGTATGAAAC[G/A]GG | | | | | |
| TAGCTGTAATCGAAAATTCACTCCAGA_NODE_1_length_658_ | | CTGGGTTGAGCATTAGCAGATTCAACTGGATTTGTTGGAGGA | | | | | |
| cov_126.082069 | | ACCGTATGGGTTTCAGTTGAGACGAATGGGATTATG | | | | | |
| RAD_kmer_0002149_1_TGCAGGAATCAAGCCAACAAAATA | 558 | CAGATGGGCCAGTATGAAACGGGCTGGGTTGAGCATTAGCA | G | A | R | A | GYSNP0632 |
| CCGAAAACAATTGGGCTTCTTTGAATGCTAGTACCATTAA | | GATTCAACTGGATTTGTTGGAGGAACCGTATGGGTTTCA[G/A] | | | | | |
| TAGCTGTAATCGAAAATTCACTCCAGA_NODE_1_length_658_ | | TTGAGACGAATGGGATTATGTTCTGGCGTGCTACCTCTGGAG | | | | | |
| cov_126.082069 | | TGAATTTTCGATTACAGCTATTAATGGTACTAGCATTC | | | | | |
| RAD_kmer_0002151_1_TGCAGGTAACATTGCCTTTCACATT | 350 | TATCTATAATGACCATTGACCAGTGACTTATTTTGAGTCAATG | — | G | G | K | GYSNP0633 |
| GTCGCTAAAGACTGCATTTTCAACCCACTGTTATACAAAT | | TTATATCAACAGGGCTTTAGCCAATCAACCCAGTGGA[G/T]TT | | | | | |
| GGGTTAATTTGGGTTATGTTTTATAT_NODE_1_length_460_cov_ | | GTTTCCCTATTAGGGTTTCTAGTTAAACCAAAACTGACCAACC | | | | | |
| 151.645645 | | ATATAAAACATAACCCAAATTAACCCATTTGTATA | | | | | |
| RAD_kmer_0002161_1_TGCAGGGCAGAGCAAGGGAAGCTG | 283 | TCAACAAATCTCAACAGCACTAACCTCTGGTTTGTTCTTAA | T | Y | Y | T | GYSNP0634 |
| GTGAGATAAACAAGAGCTTGCTTACGCTTGGCAGAGTTAT | | TATTTTTTGCTCGGTGTGCATAGTCTAAAGTACTGAG[T/C]GTT | | | | | |
| AAATACATTAGTTGAACACTCAGGGCA_NODE_1_length_361_ | | TCCTCCAAAGAGTAAATAGAGGGAGAGATAGTGGCAATTAT | | | | | |
| cov_38.351799 | | GCATGTCTTTGTTTTCCCTCCCAAAGAATCTCTTAA | | | | | |
| RAD_kmer_0002163_1_TGCAGGTAATAATGCATAATCAAGC | 261 | ACAAAACAAAACCATACCATGTCATATCTACAACTCTACAAA | C | Y | T | T | GYSNP0635 |
| AAGTTATATATTTGTATTATTCCAGTAATAACGATCATCTA | | AAACATAATATAAACATTGTAATAGTAACCAGATTCAA[T/C]T | | | | | |
| GTTTCTGTTATTCATTTGAAATGAC_NODE_1_length_600_cov_ | | TCAATTTTTTAACTAACAATAATCAATCTAAAACCTATAACCA | | | | | |
| 148.373337 | | GAACCAGGTGGTGCTGGTGGCAACCGGTTTGGGGTG | | | | | |
| RAD_kmer_0002182_1_TGCAGGTATTGTCATTACTTCTATAT | 148 | GTTCATTTCTTCGTTTAAGTCATTGCTGTCATTTGCTCATTCGG | A | — | G | A | GYSNP0636 |
| CTCAGGTAGCAACCGCAAACAATTTGCAATAGCGACACT | | TGGTTTATTTTTAACAACAAATTAATTGTAAATGTC[G/A]ATTT | | | | | |
| AATGTATAGCCTATTACAACAACAGA_NODE_7_length_467_ | | CAAGGATGACCCTGATTTGCATGTCTTCCCCAAGTCGAAGTA | | | | | |
| cov_20.276232 | | TGTTGGCATAGAGCTGTGGTAGGTAATCAATTAT | | | | | |
| RAD_kmer_0002182_1_TGCAGGTATTGTCATTACTTCTATAT | 381 | CTGGAACAATGTTTCACAACGTCCTGATATACGATGATCTTG | A | — | R | A | GYSNP0637 |
| CTCAGGTAGCAACCGCAAACAATTTGCAATAGCGACACT | | AATACGCCCACAAGTCACAGAAGAAACATGCGGAAAAC[A/G] | | | | | |
| AATGTATAGCCTATTACAACAACAGA_NODE_7_length_467_ | | AAAAGACGTATGCGACCTCAGTATCGATAAAACTTATTTGTT | | | | | |
| cov_20.276232 | | TATATCATCGTTTAGGGCTGTTAAAACTCGCCATTGTT | | | | | |
| RAD_kmer_0002196_1_TGCAGGAGAACAAGCTCAATCCCAC | 446 | ACTTTGAGTTTGGAAATTAGCATACATTGAGATTTTACTTTGT | G | G | R | R | GYSNP0638 |
| TCCCCTTTTTCAGCTGATTTACTAGATACTGGAATAGACCC | | TTGTCTCACTTTAATCGACATTTAATATTATTTAGCC[G/A]AGA | | | | | |
| CTGAGTTCCATTGATGGGTACTTTT_NODE_1_length_548_cov_ | | ATAACAAACTACAAAGTGCTTCTTTGCAGGTGTAAAAAGTAC | | | | | |
| 77.350365 | | CCATCAATGGAACTCAGGGGTCTATTCCAGTATCT | | | | | |
| RAD_kmer_0002202_1_TGCAGGATTGCAACATATATGGGCC | 183 | TTCAGAAGCGCTCTCGTTTTACAACGGCCTGTACAAGAACCT | Y | T | Y | Y | GYSNP0639 |
| TTATTGACATTTGGCAAGTGGAGTTGGGGAGGACGCACAT | | TTATTAGTCGTGGCTTTTCTTCCTTTACCATCAAACGG[C/T]CT | | | | | |
| GTCCAGCAGCTAGTGGCACACACATT_NODE_1_length_416_ | | TACAGTTGGTCAACTTGTCACATTCAAATGGAGACTTGAAAG | | | | | |
| cov_57.028847 | | GTTAACCAGTTTTCACCTCGAGGACGAATTATTGTA | | | | | |
| RAD_kmer_0002203_1_TGCAGGTATGAAATATTTCTACATC | 109 | TTAACTGTTGCATGGTTGACATTTGTGATAATGTGATTGTTTG | R | A | R | A | GYSNP0640 |
| CCCTCTTTGTGAAATACCTTTATTCATACCATGTTTGCTTC | | AGAGGATAGCGCACGCATATGGTTGAAATCTCAATTT[A/G]A | | | | | |
| TCGTACACATGATCGTAACTCCTTT_NODE_2_length_447_cov_ | | AAGTCATTTATATAAACTAGTATAACAATTACTAAATTGACA | | | | | |
| 50.384789 | | TCTGAATCATTATGTATACTCTCCTCTTATACATTAA | | | | | |
| RAD_kmer_0002206_1_TGCAGGCTTTTGAGGTGTTCCAGAC | 288 | GGTTTAAGAGTCTCGTGGCTTCGGCCCCCCCAAAAAAAGTTT | W | W | A | W | GYSNP0641 |
| TCATGAGATCTGAGCTGATAAGCGGCAGACGAAGTCTCG | | TCAAGCTCCGCCACTGCTGAGAAAGATGGTTTCTTTTT[A/T]A | | | | | |
| AACAAGAGTGTCAAAATGGTTGCCACC_NODE_1_length_497_ | | TTAAGGCATTTGCGGCTGGTGTCATATTGATTATTGGCTACTG | | | | | |
| cov_189.370224 | | GTTTTATACATGTACTTCCTGATGCATTCGAGAGCT | | | | | |
| RAD_kmer_0002215_1_TGCAGGTAGATATCCCATCTTCTTTT | 403 | CACCGCAGCAATGAAGCTACACCGCAGCTCAGGAGGGATCT | Y | Y | C | T | GYSNP0642 |
| GCTGCATTGCTTTTGAAGAACTGTGAGGCACCATACCCGA | | AAATCGCATAAAAGTTTAGTCACTTCAAAATATAATTAT[C/T] | | | | | |
| ATCATGGACATGTTATTTTAGCAGA_NODE_1_length_640_cov_ | | CTTTTGGTATGGGATAGACTGTTGATGTATATGGTGTACCTGA | | | | | |
| 146.295319 | | GGAGCAACTTTTGTCTTCAAATAAAGGGCCATGTCAC | | | | | |
| RAD_kmer_0002218_1_TGCAGGCTAATGCTCCTACTGTATT | 460 | AATGATCTACGCAAAATTGAGGATCATCCATACCCACCTAAA | C | A | M | M | GYSNP0643 |
| TTCACTTCTACTATCAGAGCCCCAACCCGAGGTTCACTAA | | GGGTTGGGTTTAGAATACCATTCACATTCCTATCCAAT[A/C]A | | | | | |
| TCATTACACTCTTCGGATAGGGTTTT_NODE_1_length_597_ | | TTTATCAAACCCGCAATCATAGTGATTCCCTGTTGCAAACCAC | | | | | |
| cov_83.597992 | | TCGCCACCTGAATTAGTAATTGTTGACAAAAACCCT | | | | | |
| RAD_kmer_0002224_1_TGCAGGTGTGAACTAATTATCAAAA | 415 | GGCATTATGACATCAACAAAGGGTGTATCATTTTTGTGTTCA | G | R | R | G | GYSNP0644 |
| TGAAAATTAAATCAATCATGGTTTGTAAAATATAGCTAAC | | AAATAGGGATGTTCTAAATCTTCCAACTGGTTATATTC[A/G]A | | | | | |
| CAAGTTTTTGACAAACCATTTTTCTT_NODE_1_length_617_cov_ | | ACACTATTGACTATTTTTTGGACTTAGGACACTTGACCCCTTT | | | | | |
| 86.338737 | | ACTTTCATTGTAACTAAAAAGAGAGAAACGTTATAT | | | | | |
| RAD_kmer_0002227_1_TGCAGGTCTTCCAGCTCTCGAGTGC | 214 | ATACATTGGGTTTCATGGGACCGGGTTACTTTAAGTAAAAAG | C | Y | Y | C | GYSNP0645 |
| AGGCTTCATATAAGGGATGATCCAGAAAAATGTTCTGAGT | | GCGGGAGGTTTAGGGATCTCGAGATTGAAGGAAGTGAA[T/C] | | | | | |
| ATTCCAATATTGACCCCGTATAAGAC_NODE_1_length_420_ | | GCTGCTCTTTTATTCAAATGGAACGGTAGGTTTCGCTCGGAAT | | | | | |
| cov_38.219048 | | CCGGTAGCTTATGGAACCGAGTCATGAGTTATTGTCA | | | | | |
| RAD_kmer_0002227_1_TGCAGGTCTTCCAGCTCTCGAGTGC | 274 | TCGAGATTGAAGGAAGTGAATGCTGCTCTTTTATTCAAATGG | A | M | C | M | GYSNP0646 |
| AGGCTTCATATAAGGGATGATCCAGAAAAATGTTCTGAGT | | AACGGTAGGTTTCGCTCGGAATCCGGTAGCTTATGGAA[C/A]C | | | | | |
| ATTCCAATATTGACCCCGTATAAGAC_NODE_1_length_420_ | | GAGTCATGAGTTATTGTCATAAGACTCGGGCTAGTTTCTACTC | | | | | |
| cov_38.219048 | | CTTACCGGTCAACAATCAGCTTGGCGTGAACCGAAA | | | | | |
| RAD_kmer_0002227_1_TGCAGGTCTTCCAGCTCTCGAGTGC | 326 | TTCGCTCGGAATCCGGTAGCTTATGGAACCGAGTCATGAGTT | R | G | R | R | GYSNP0647 |
| AGGCTTCATATAAGGGATGATCCAGAAAAATGTTCTGAGT | | ATTGTCATAAGACTCGGGCTAGTTTCTACTCCTTACCG[G/A]T | | | | | |
| ATTCCAATATTGACCCCGTATAAGAC_NODE_1_length_420_ | | CAACAATCAGCTTGGCGTGAACCGAAAATGTGTTGTGAAATT | | | | | |
| cov_38.219048 | | TATTGACAGCCTTACGGTGGGAGAACGCCCTCTTTTC | | | | | |
| RAD_kmer_0002229_1_TGCAGGAAAGAGTCTTAGCATAATA | 466 | CTTCATTTCAGAAAATATGATGAGCGTGTTGGAAAACGCTGA | C | C | T | Y | GYSNP0648 |
| CAGGTGAGATACATAAAATAAGAAATTAGATTGTTAAAA | | CATGGGCATACGATTCCCTGATCTTCAGTTTTTGGCAA[T/C]G | | | | | |
| TCAACCTGAGTTATGGAGACAACATAG_NODE_1_length_648_ | | GCATCGTCTCCTGTACTTGCATCTGATGCTTTTTCAACTTTAA | | | | | |
| cov_90.186729 | | TGTGGATCCTCTTTTGTCTTCCAGTACCTTTTATGT | | | | | |
| RAD_kmer_0002247_1_TGCAGGCCACAAATTATTCACAAAT | 257 | TCATTCAAGGGTAATGTTAACTTGTTATGTGTTTATAAAGATT | A | G | G | G | GYSNP0649 |
| CAAATCATAAATTCTAGTTATTCATAATTAGTTTTATGGAC | | TATGTTTTAATGGATTTCTATCTTGGTTTAAAAGGGC[G/A]CG | | | | | |
| GCAAGGCGCTCCAAGGCGTTTAGGT_NODE_1_length_618_cov_ | | CCTTATGCACGAGGTGCTCTAGGAAATTAGGAAAGTGCCTTT | | | | | |
| 129.991913 | | AGGTCCTTGAGGCACCGCCTCATGCACATGTGGGTC | | | | | |
| RAD_kmer_0002249_1_TGCAGGAGTCAGCAACATCTTGCAC | 217 | GCATTGAAGAAACAGCTTATCATCTCCACTGTTCTTATGACCG | — | G | K | G | GYSNP0650 |
| AGGGCTGCATACATTAGAAGATAAATGAATAAATGTTCA | | TTGGCATTGCAATCGTTAGTTTCATTGGGCTCCCGAC[G/T]TCC | | | | | |
| CATAAATTAAAAAAATAAAAAATAGAA_NODE_1_length_548_ | | TTCACAATCTTTAATTTTGGTGTTCAGAAGGTCGTGTATAACT | | | | | |
| cov_77.029198 | | GGTAAGCAAAAGTTTCTTATCGGTTCATTTTTAT | | | | | |
| RAD_kmer_0002249_1_TGCAGGAGTCAGCAACATCTTGCAC | 351 | AAAAGTTTCTTATCGGTTCATTTTTATATATACACTGTTGAAA | C | C | T | C | GYSNP0651 |
| AGGGCTGCATACATTAGAAGATAAATGAATAAATGTTCA | | TCACACCAAGTTTATTAATTTTGGTGTTTACTTTTGA[T/C]GTC | | | | | |
| CATAAATTAAAAAAATAAAAAATAGAA_NODE_1_length_548_ | | TGTATGCAGGCAACTTTTCTTGTGCGTATGTGTCGGTCTTTGG | | | | | |
| cov_77.029198 | | GCTGGACTAATCATTGGTTTTGTGACCGAGTACT | | | | | |
| RAD_kmer_0002250_1_TGCAGGACCGGTCCGGTTTTGATCA | 102 | CTCTGTTCACCAAATACAAACCTGGTGCATGAGGCTCTCGCA | M | M | M | C | GYSNP0652 |
| TAGAGTGTCATTTTCCAATCCAACATGTTCATGTCTGCAGT | | TGTGCGTGTCGGGCCAACGTGGGCCTTATGCACGCATC[A/C]T | | | | | |
| GGGCTCGGTTAATATAGGCTTGGGT_NODE_1_length_466_cov | | TACCTTGCATTTCTGATGGAGGCTGTTTCCACTAATCGAACTT | | | | | |
| 209.618027 | | GCAAACCTCTATTCGCTAAATATGTAATTAAATGAC | | | | | |
| RAD_kmer_0002251_1_TGCAGGTTGGTGATAGTAACACTAC | 302 | ATCTAGGGTACATGCATTATTGTTTAGGGTACGACATTAGGG | R | R | A | A | GYSNP0653 |
| AGCCATAATATAGCTTCCAAGATTTCAGTTTAAGATAAAT | | CTGAAGAAAGTATCAAGTATTGATTGGTCCCACAATGA[A/G] | | | | | |
| ACCATCTCTAGTTTGTGTTTTATTTC_NODE_1_length_624_cov_ | | GGTACGTGTGAAAGCTCTATGAACACAATGATACAAAATGAA | | | | | |
| 77.451920 | | ACCAGGCAATTGATTACTGTAAAACCATGGAGGAATAA | | | | | |
| RAD_kmer_0002257_1_TGCAGGATCAATCAAGCTATCGAGA | 204 | ATATTTTTAAACCAAAATATAACATTTAGTTTCTTTTTCTAAT | A | C | A | C | GYSNP0654 |
| TTTGATTTGAGAAAAACCGTCCTTGAATATTGCTTCCACG | | GAATTACAGCCGTGGTCGGGGATGGATTTATCGGCCG[A/C]G | | | | | |
| GTCTCCCGAGGTATGTTTTAACTCCG_NODE_1_length_385_ | | GTTTCACTGTCCGAAACACCGCGGGCCCACAAAACCACCAAG | | | | | |
| cov_30.381819 | | CAGTGGCGGTCCGCAGCGGCTCGGATCTTTCGGTATT | | | | | |
| RAD_kmer_0002259_1_TGCAGGTGAGGAACGTCTTCATTTT | 290 | TCCTTTTGATTAGACATATAATGCTTCAAAAGGTTGTCACCTT | A | — | A | R | GYSNP0655 |
| TTTCTTTTAATTTTGTCCGTTTGTGTTTGAAGATTATATAC | | CATGTTGAAATGGACAGTGTAGCAGATTCGGGTGTTC[A/G]TC | | | | | |
| CTTAGTCTAATTTCAAGTATATATA_NODE_1_length_400_cov_ | | TTCTCTATAATTTTTATTAATTTTCCCAACACCTGATGAATAG | | | | | |
| 67.224998 | | TATATATACTTGAAATTAGACTAAGGTATATAATC | | | | | |
| RAD_kmer_0002267_1_TGCAGGATTGAGAATGAACGTACCA | 143 | GAACTTCAGAGCTTTATTGACAAGTAAGTAATTAGATGTTAG | A | C | C | C | GYSNP0656 |
| AATTTGGTTATGTACAATAGGCTACATAAATAAATGCACA | | TCAGTTAAACCTGTTACTGCTAAATATTTTTTTTACCT[C/A]CA | | | | | |
| GACAATACTAAAAAAATAACATTTTG_NODE_1_length_685_ | | TATACATATGATTTAATAACTGGTGTTGACTTATTAGGTTAAA | | | | | |
| cov_72.191238 | | AGTCTGGTAGCAATGACAAATAAGTGCATGTTTGG | | | | | |
| RAD_kmer_0002278_1_TGCAGGCAGATTGTGTAACCTTCTT | 165 | GAAAAATTATGCTGGATTAATTTATAAGTACTTGCTATTTGTT | C | C | A | A | GYSNP0657 |
| CAGGCTGTTGACATTGAATGAACGGAGGGATGCATCCCTC | | TTTGTTAGGTTCTGGGATGACATTGAGGAGTGATGAC[A/C]CG | | | | | |
| ACTTCCAATTATGCGGATCCAAAAGA_NODE_1_length_554_ | | GCCATCATGAAAGGCTCCAGAACAAGGTGACATAAGTGAAG | | | | | |
| cov_84.070396 | | ACTACATCTGGAGATAGCCAGGGAAAAACTATAAGTA | | | | | |
| RAD_kmer_0002283_1_TGCAGGGGGTTATCTCTTTGATTTTT | 227 | TGAACGATGTGATGAACGATCTTTTCTGGGACCATTTTCTGCT | R | R | R | G | GYSNP0658 |
| GACAAAGCTGTTCTCGAGCCTACGTTTTGCCCTATGTATG | | TCAAAAGCTCACCAATTAAACGGATGTTTCCGAGAGT[A/G]C | | | | | |
| CTCAACTGTGTTCAGATCTCAACAA_NODE_1_length_475_cov_ | | GCAGCTTAATTATTCTTTCTTTATCTCTGCGTTCAGATTCTTGT | | | | | |
| 160.035782 | | TCAGGGGCAGTCATTTGCCTAATTTCTGCCCTTAG | | | | | |
| RAD_kmer_0002288_1_TGCAGGTCCAGTTTGTTCAAAACCT | 377 | TGGAAAATGAATAATTAGATTATTTGATTACAAAATATTATG | W | A | W | A | GYSNP0659 |
| CAATTAGTTGGAAATTGTGGTTCTTATACCTTTTGAGCTTT | | AACTGATAACTGGACTGGATGAGTATAAAGTGACTATT[T/A]T | | | | | |
| TCGGCACATCTGATGTATTAATTTT_NODE_1_length_436_cov_ | | TTATAAGGAAGTGAATGAGAAGCTACTGGATGCATTGTCATC | | | | | |
| 49.348625 | | AAGCTCACTCATTGTGGATAAACGTACATATGAATTT | | | | | |
| RAD_kmer_0002290_1_TGCAGGAACAGGAAGACGACGAGG | 386 | ACAACGATCTCGCCCTCATCTTCTTATTCGAACCATCATCATC | — | Y | T | T | GYSNP0660 |
| AGGATATGGATGTTCGAGGATTTAACCCCGCAACAGCAAA | | CACATCCATGTCATGATCAGCTGACCTCTCCCTCTTA[T/C]GA | | | | | |
| AGGAGCTAGCGGAAATCAGGAGAAAGAA_NODE_1_length_ | | CCTCTAGACTTGCTTCGAGCCCGTTCAATTGCTTTAGACGGGT | | | | | |
| 630_cov_97.315872 | | CAAGTCCCAAAGATGAAAGTTGTCGGCCCATTCTC | | | | | |
| RAD_kmer_0002290_1_TGCAGGAACAGGAAGACGACGAGG | 490 | CGTTCAATTGCTTTAGACGGGTCAAGTCCCAAAGATGAAAGT | — | R | A | A | GYSNP0661 |
| AGGATATGGATGTCGAGGATTTAACCCCGCAACAGCAAA | | TGTCGGCCCATTCTCTCAGAAGTGAACTTTTTGTCCTT[A/G]TC | | | | | |
| AGGAGCTAGCGGAAATCAGGAGAAAGAA_NODE_1_length_ | | GAACTTTCTTGGTACAATGGGCCGGCTTTCTGCTGTGCTTTTC | | | | | |
| 630_cov_97.315872 | | TTAATTCTATGTTCTCTAATGAGTATGCTTTTCTT | | | | | |
| RAD_kmer_0002292_1_TGCAGGAGACATGGATGATTCGTTT | 180 | AAGTAGTTAAAAGCTAAAACCACACTCATGGTAGGGTCCGTT | T | A | A | T | GYSNP0662 |
| TCCCGAATTCAAAATATAAATAACTTGTTATACATAACCA | | GTGCTTTTAGTAAACAGTTACAAGACTCTAAAAGTAGG[A/T]A | | | | | |
| ACCATGCCTATGTGTCTTATTCCAAA_NODE_2_length_302_ | | TCTTGAAAGCAATCTGGTTTATTCTTCATTCTGCTTTAATTGTC | | | | | |
| cov_29.112583 | | TTCTTTTTCTTTAATTTTTTAGTTTAAATGATACA | | | | | |
| RAD_kmer_0002300_1_TGCAGGAGATTCAAGGAGCTCTACA | 397 | TATCAATCTTTACATGTCACAATACAATGACAACTTAAAACG | A | G | G | — | GYSNP0663 |
| AGTGAGAAATTGAACTTTCGGATTTCAATCCAGGTTTTGT | | ATTTAGATACGCATAGAAACACAATAATTTTAAGCTCT[G/A]C | | | | | |
| AGTTTTAAACCTTTCAATAAATTTCG_NODE_1_length_526_ | | AGAAATCAAATATCTTGACAAATCTATGGCTCCAATTTGTTA | | | | | |
| cov_130.604568 | | AAAAGAGAGTCGAATGCAACACGAAATTTATTGAAAG | | | | | |
| RAD_kmer_0002302_1_TGCAGGTGACGAGTTACCAATGTCA | 191 | ATTGGGCCTTTGGGCTTTAAAAGCAGAACTTGAAGACCTCTG | R | R | R | G | GYSNP0664 |
| TATTAACATTCCAGATATGTTTTTTCATTATTTATAGTCTT | | CTTTGCTGTTCTTCAGGTCAGTGATTACTACTGATACC[G/A]TG | | | | | |
| ATTTGAGAGTTGAAGGTTTATGACA_NODE_1_length_501_cov_ | | TGATCATTGTATAGAGATGAATAATTACTGATTTATATGGCGT | | | | | |
| 190.814377 | | GCAGCCTCAGATCTTCCGCCAGATGCGATCTGACC | | | | | |
| RAD_kmer_0002309_1_TGCAGGCTGTAGTGCTATATCAAAT | 242 | AGGATCATTTAAAGGATATTTAGATTTTTTAAAATTGTCTTAT | C | Y | Y | Y | GYSNP0665 |
| CTACACCTAAGTAACCTAGAACCGTCAAAATACTAGTAGT | | TTTGTTTTTAAGTATTCGTATTTTATTTTTATAGTTT[T/C]AGTT | | | | | |
| ACCTAGCATGATGTACCCTAAAACTT_NODE_1_length_396_ | | GTGTAACATTTCTAATTTCTAATTTTAATGAAATTTAAATTTT | | | | | |
| cov_44.515152 | | AATTAGATTTAATTGTTTAAATTATTTTAAATT | | | | | |
| RAD_kmer_0002316_1_TGCAGGCTGCATCACACGCATGCAC | 244 | AGATCTAGAGTTCATTGATGAGTTATTTGCAAATGTTGGAAG | R | G | A | R | GYSNP0666 |
| CAAGTAAGGTGGACCAGAATGAATCACATTGTTACAACA | | ATAGTTTTTCTTGCTCTTCTCGAGCCTACAGAAAGCTT[A/G]TG | | | | | |
| ACTGCAGTTTAAATAACCTGAAAACAT_NODE_2_length._359_ | | TACAAAGAGTCAAATACTGTACCTTGATTGACCGTAGTTAAA | | | | | |
| cov_39.724236 | | TTACTAGTCAACTGTGCACTTCCATTGGTTTAAATT | | | | | |
| RAD_kmer_0002319_1_TGCAGGTGATGTTGATGAGGAGGA | 381 | GCACCAATACCTTGAATTTCTCTCTTTAGTAATCGGACTGGGC | W | T | W | W | GYSNP0667 |
| GAAGGCAATTGTCCTATACAAGGTAACAAAACACTAAGT | | AGCTCATGGGCACCAGGCTGACAGAGAAAAAAAAAAT[T/A]G | | | | | |
| AGAGTATTCTTATATTCTAGTGTGTAAT_NODE_1_length_464_ | | AATCAATAATCGATTTTATTACACACTAGAATATAAGAATAC | | | | | |
| cov_92.364227 | | TCTACTTAGTGTTTTGTTACCTTGTATAGGACAATTG | | | | | |
| RAD_kmer_0002330_1_TGCAGGCTGCAACATTTTTCACTCC | 556 | GTGATTAATATGTCTTTCATGTTTTCAATGTGTGAAGTGTCGT | C | M | C | A | GYSNP0668 |
| AATTGTTATCTCAGTGAGATGTATGAGGCGGTACACCACT | | TTCGAGTCTTGGAGATTTTGTTATATACTTATCGGTA[C/A]TCT | | | | | |
| GATCAATGAAATCTCAAAGTGAAGAG_NODE_1_length_620_ | | TCACTTTGAGATTTCATTGATCAGTGGTGTACCGCCTCATACA | | | | | |
| cov_148.848389 | | TCTCACTGAGATAACAATTGGAGTGAAAAATGTT | | | | | |
| RAD_kmer_0002331_1_TGCAGGCAATTATTTACAAAATGAA | 338 | ATAAAAAACTATAGCTACCAGCTATCAGCTACAGCTACCAGC | Y | C | C | T | GYSNP0669 |
| TAAGTCACAAAAGGATCGAAATAGAACAAAAGATGAAAC | | TACCAGCTTCCAGCCACCAGCCAACAGCTTCCAGCCAC[C/T]A | | | | | |
| TAACGGACGCTCACACTATGCTCATAA_NODE_1_length_460_ | | GCCAGCAGCTAGTTTTCCCAAACATACCCATGGTTGACCTTG | | | | | |
| cov_60.582607 | | AAAATTGTATTATGCATAGAAGCTGGCAATTCCTTAA | | | | | |
| RAD_kmer_0002343_1_TGCAGGACCGCTTCTTATACCACGT | 163 | ATATGCATATGGAAACATAGCACATCTTATCATCATATTTGAT | W | T | T | W | GYSNP0670 |
| AAAGCTATTGAAACATGTGAAGTAATGGGATACACCATTC | | TACAACTTGTATAAAAATGTTTTAAGTTACATGAAAC[T/A]TG | | | | | |
| CAAAAGATAGTCAAATATTAGTTAAT_NODE_4_length_353_ | | TATCAACTAGATGATATAAACCTAATCCATGGTGTCAATTCTT | | | | | |
| cov_40.311615 | | GAACTGTCCATTACTGAGCTTGAATATTACACGCA | | | | | |
| RAD_kmer_0002343_1_TGCAGGACCGCTTCTTATACCACGT | 239 | AAACTTGTATCAACTAGATGATATAAACCTAATCCATGGTGT | R | A | A | R | GYSNP0671 |
| AAAGCTATTGAAACATGTGAAGTAATGGGATACACCATTC | | CAATTCTTGAACTGTCCATTACTGAGCTTGAATATTAC[A/G]C | | | | | |
| CAAAAGATAGTCAAATATTAGTTAAT_NODE_4_length_353_ | | GCAGTGGTTCCTTCTTGTACATTGCTATATCCATCTCCTCATC | | | | | |
| cov_40.311615 | | CATGTTGATAGCCATGGGGTTTATATTATCCGGAAT | | | | | |
| RAD_kmer_0002347_1_TGCAGGTTCAAAATCCATGTTTCAC | 117 | AATGATATATTTTATATGCTAAAATTAACGCATCAATTACTCA | C | C | T | C | GYSNP0672 |
| GATCACTAAACTGATCGCGGGCTCAAACGTATACGCTTGC | | ACGAGTAATCCCCGTGGGAGTACTCGGCGTGTCATCT[T/C]CG | | | | | |
| CAGCTAAAGTCCAGCACAATAAGGCT_NODE_1_length_399_ | | AGTACTCCCCGACTATGGCCGAGTACTCCCAACTCCCCTGTC | | | | | |
| cov_104.837090 | | AACCGATTTAGCACCGTCTAGCGACTTTTGCAACCA | | | | | |
| RAD_kmer_0002347_1_TGCAGGTTCAAAATCCATGTTTCAC | 280 | GTAATAACATTGCTAAAATCCAAGAAAAGGGGGATACTAATT | Y | C | T | C | GYSNP0673 |
| GATCACTAAACTGATCGCGGGCTCAAACGTATACGCTTGC | | TCTTACAGTTTTAAATGCATCCAAAGCAGCTCCAGAGC[T/C]G | | | | | |
| CAGCTAAAGTCCAGCACAATAAGGCT_NODE_1_length_399_ | | ATTGAAATTTATAATTCTCCAAGATCTAGAAAGGCCTATACC | | | | | |
| cov_104.837090 | | ATAGTTGATCTAGCCTTATTGTGCTGGACTTTAGCTG | | | | | |
| RAD_kmer_0002352_1_TGCAGGAAGTAGGTCCCAGTCATCG | 205 | TCAAAGAGAATGTATGCCTTCATGTTTAATTTATTTACCTGAT | T | T | Y | Y | GYSNP0674 |
| AGAAGTTTAGGCAAAAAGAAAGCTCTTATATCTCCTAGTT | | ACCAAGTTGCAGATTAAGCATCAGATAGTGGCTTTTA[T/C]GG | | | | | |
| CTTCCTTTAGGTCAGAGAGGTTTAAG_NODE_2_length_440_ | | TCTTCAAAAATGCCTGCGGGCTTCTTTTTAATTTCCTTCATTTG | | | | | |
| cov_53.572727 | | AAATTGCGTTGTTCTCTTTTATATGATGATCCA | | | | | |
| RAD_kmer_0002352_1_TGCAGGAAGTAGGTCCCAGTCATCG | 309 | TTCTTTTTAATTTCCTTCATTTGAAATTTGCGTTGTTCTCTTTT | T | T | K | K | GYSNP0675 |
| AGAAGTTTAGGCAAAAAGAAAGCTCTTATATCTCCTAGTT | | ATATGATGATCCAGCATAATTCTTAGTCATTTCTTT[T/G]ATCA | | | | | |
| CTTCCTTTAGGTCAGAGAGGTTTAAG_NODE_2_length_440_ | | GAACCCCTTGTATATATTCCCTTTCACAAACTATAGTACTATT | | | | | |
| cov_53.572727 | | ATCATCTTCTTCACTTTCTCCTTCATCAGATAA | | | | | |
| RAD_kmer_0002353_1_TGCAGGTAAACATGAAACTGAATG | 293 | TGCTAGAAAATTGAGTTTGTGACTGCATTTGCGGTCGCAAAA | G | T | T | T | GYSNP0676 |
| AAGAGCGGCAACACTTTCTAACCCACAAGACGCAAGATA | | TGGTCACAATTGCCTTATTGCGACTGAAAATGCTGTAG[T/G]A | | | | | |
| ATACCTCGAAAACTAGAGAGATAACATA_NODE_1_length_ | | AATACACCGTCGCAATTGCCTTATTGTTACCGCTTCTATATTT | | | | | |
| 595_cov_106.448738 | | TGTGACCGTTCCTTTTTGCAACTCAATTTTGTTTTG | | | | | |
| RAD_kmer_0002353_1_TGCAGGTAAACATGAAACTGAATG | 401 | TTACCGCTTCTATATTTTGTGACCGTTCCTTTTTGCAACTCAAT | C | C | T | T | GYSNP0677 |
| AAGAGCGGCAACACTTTCTAACCCACAAGACGCAAGATA | | TTTGTTTTGAAAGGATTTATTTTAGTTTCCAGTGTC[T/C]TTTC | | | | | |
| ATACCTCGAAAACTAGAGAGATAACATA_NODE_1_length_ | | GATTTACAAATATATCCAAAATCATATATAAGAAGACGATCA | | | | | |
| 595_cov_106.448738 | | GACCAAAGATTTATATATATTGACGAAATTATAC | | | | | |
| RAD_kmer_0002356_1_TGCAGGAACATATAACTACCCTATA | 321 | TTCAAGTACACGTCACCCGGTTCATATCTTTATCACACTATAC | A | A | W | W | GYSNP0678 |
| GATTCACTATGTATAATATATGCCACAAACGGTCCGTTGT | | AGTTGCGTGATACCAAACAGAGTGTCATGAACTCCCC[T/A]TT | | | | | |
| CCTCTGTGGAGGTTTCCCTAACCCCT_NODE_1_length_582_ | | TTGTATTTTAAATATTTCGGGGTGAGCACATGCTATGTTTTAT | | | | | |
| cov_173.087631 | | TTAAACTTTTGTTATGCTACAAGATACTGTTGCCA | | | | | |
| RAD_kmer_0002357_1_TGCAGGGTCAGATAAATATGCATTT | 402 | TTCTTATTATGGCATCTGCAGCTGGGTAATATATTTACTTCCC | Y | T | Y | Y | GYSNP0679 |
| TGCCATTCAATTTGAGTCCACTGATGGCTCAAAGGCTCGA | | TACCTTTTAGTTTACATGCTTGATGGTCAATGCTGAT[T/C]TCA | | | | | |
| GCAACCAGGTCATAACTTCTTGTTGT_NODE_1_length_506_ | | TTGACCATGCTATTTACACTGGTGCAGACCTCAACAACAACA | | | | | |
| cov_178.144272 | | AGAAGTTATGACCTGGTTGCTCGAGCCTTTGAGCC | | | | | |
| RAD_kmer_0002361_1_TGCAGGATATGAGAGTGATGGACCC | 116 | CGCCGACTAACGTCCAAATCAGTAAAGACATTAGTGGGTAAC | G | R | R | G | GYSNP0680 |
| ACAACATCAAATGAGATGACCCCATTGTCTTTTACAATGT | | ACATGTTCTTATAGTTTAACTTCATCAACATTGACCAT[A/G]T | | | | | |
| TTTTATGAGTAAGTAATGTCGAGAAA_NODE_1_length_610_ | | ATTTTAATTCATATATATACATATATTTTCTAACTATCATGAG | | | | | |
| cov_75.060654 | | CTCCAGAAATTTAATGTTGGAAAATAATTATTTAAA | | | | | |
| RAD_kmer_0002361_1_TGCAGGATATGAGAGTGATGGACCC | 181 | ATCAACATTGACCATATATTTTAATTCATATATATACATATAT | A | R | R | A | GYSNP0681 |
| ACAACATCAAATGAGATGACCCCATTGTCTTTTACAATGT | | TTTCTAACTATCATGAGCTCCAGAAATTTAATGTTGG[A/G]AA | | | | | |
| TTTTATGAGTAAGTAATGTCGAGAAA_NODE_1_length_610_ | | ATAATTATTTAAAAAAAAAGAAAGATATTATAGGTCTATTAT | | | | | |
| cov_75.060654 | | TATTGTGATTTTTAATGTTTATTATTTTTTAGTATA | | | | | |
| RAD_kmer_0002363_1_TGCAGGTCACACAAACAATTACATT | 252 | CAGAATATAACAGATCTCTTGCCAAGGCTTTGAGTGGCAT | A | A | G | G | GYSNP0682 |
| TTAATAAATCACCAAAAAAATATGGATTTTTAACAAGATT | | TTTAAAAAAGTATTACTCTATTGTCTTTTAATATTTTG[G/A]TT | | | | | |
| CAGGGTAAATAATATTGCCTGTATGC_NODE_1_length_545_ | | TGTTGAATATATATTATAGGTTATATACTTATTCTTTGTAGGC | | | | | |
| cov_135.677063 | | ATCTCATGTTGTTTGAAGACATTGGAGGCGATTAC | | | | | |
| RAD_kmer_0002364_1_TGCAGGTGCTTTAAAACTATAGTAA | 91 | TCTGAAGATCTATATAAACCGAAAGACTTGTTCGATCCTGGT | W | T | A | T | GYSNP0683 |
| AAGGAGGAGGGCTCCTTAATTGAAGAGGGCCCCACGAGT | | GATTCACTATTAGCATCGGTATTCTCTGGTGAAGTTCA[A/T]A | | | | | |
| ACTCAGGTGGGACCATGCTTTGTTTGG_NODE_1_length_592_ | | AGTTTCCTGGTGAAAGGTTTGTTTCAGATGGATGGCTTAACAT | | | | | |
| cov_87.266891 | | ATTAAGAAAAGTGGGCCTTCAAAATGCTGGTGATCC | | | | | |
| RAD_kmer_0002365_1_TGCAGGAAGCATTCACGAAGACAG | 133 | TTAAAACATTGGCGCTAAAAAAGAACTGGGTCAAATGGGAG | T | — | A | A | GYSNP0684 |
| CCCAGCTCCAAAATACCTTCTTGAATCCGGGGTTGACCGC | | ATACACATCTAGCATACAACTATAAATAAAAAAATTAGA[A/T] | | | | | |
| AAACTCTTAAATTTTTATGGTAGTAGA_NODE_1_length_568_ | | CATACCTATTGTTCTAACTTCTAACTACTTCCAAAGTGAGCA | | | | | |
| cov_96.121475 | | TTAGTAGCCTAAAAGATCCAAATGGATCCCAAAAATTA | | | | | |
| RAD_kmer_0002367_1_TGCAGGACAGAGGATCCATTGGGA | 195 | AAAGCACTTGCCAATGCTGCTGCGGAAGTCTCTTGGGTTAAA | R | G | G | R | GYSNP0685 |
| ACTCCGATCTTGAAATGGATATGTAGAAAAGGGGAGCGT | | AATCTACTCGGTGAACTTGGCATCAAAAACATCAAAAC[G/A] | | | | | |
| GGAAGTGGTTTTGTCAAAGCATCGGCCA_NODE_1_length_312_ | | CCCAAACTATTCTATTCTGTGACAACACGGGAGCTACATATTT | | | | | |
| _cov_63.083332 | | ATGTGCGAATCCTGTCTACCACTCCCGTATGAAACAT | | | | | |
| RAD_kmer_0002368_1_TGCAGGCATAAGAACTTGCCAAGG | 222 | CCTATTTGCACTGCCATTTTGGAAAAGCCAGATAACCGCTATT | M | M | C | C | GYSNP0686 |
| AAACACAATCACCAAAAACCAATGAATCAAACTTCTTTAG | | GACTGCTTAGCACAAAAATTAAGCAAATAGTAGAGGT[C/A]A | | | | | |
| AAACATGTACCTTTGAAACAAGTAAAG_NODE_2_length_408_ | | AGTGGCACTGGAGAGTGAAAGTTATGGTTATTTAACTGGCAA | | | | | |
| cov_37.036766 | | GTTAAGAAAAAGAGCCTAACGAAACCTTAAAAAAGAT | | | | | |
| RAD_kmer_0002374_1_TGCAGGTTAACCTGTACACAGACGC | 312 | AAGTGTTACAAGTAACCGATTTACTAGAATATGGGTAAATAT | A | W | A | W | GYSNP0687 |
| TGAGACTCTAAATATGATGGGTAAGCTGGATACCGGTTTT | | GATACATTTAGTGTTTTAAAAGGTAAATATGATATTAT[A/T]A | | | | | |
| GTAATGTGTAACTTTAGGTTTGTTTT_NODE_2_length_454_cov_ | | AAAAAAAGAAGGATATATATGAATTTGGTCGAATAAAAAAC | | | | | |
| 56.519825 | | TAGACATCAATAATGGGTATACTGGATAATCAATCACC | | | | | |
| RAD_kmer_0002383_1_TGCAGGGAAGATAGATAATATGTTC | 200 | AGCCGAAGAGATTTGAATCTCGGTTGTGAACCTCAGTTACCA | C | — | A | A | GYSNP0688 |
| CCTCAATTACTGCATAATATATTTGTACAATGTGAAAAAG | | TAGTTTCTAAAAACTTGAAAAACAATACTTTGGAATGT[A/C]C | | | | | |
| CATGCACATTGGGATCTTGCTGCTGA_NODE_1_length_582_ | | AGCACTTTTGAAATACAACTGTGACGAGTTAACATAATTTCA | | | | | |
| cov_77.355667 | | GAACCTTCTAATGGTTACTTTGGTATTTTGCTATTTT | | | | | |
| RAD_kmer_0002385_1_TGCAGGGCAAACCGAGTAGAGGTTT | 469 | TACGTAAAAATTAAAATTCCTAAATCAAGCAGAACTCGTCTT | R | A | R | A | GYSNP0689 |
| GATGATAATTTGTTACTTGGAATCACATAAAAATTAGTCT | | GACCCGTTACCACCCGACCAGCCAATAAAACAAACCTC[G/A] | | | | | |
| CTAGTAGAGGTGGTAAGACGAGGTTT_NODE_1_length_526_ | | TCTTACCACCTCTACTAGAGACTAATTTTTATGTGATTCCAAG | | | | | |
| cov_110.321289 | | TAACAAATTATCATCAAACCTCTACTCGGTTTGCCCT | | | | | |
| RAD_kmer_0002393_1_TGCAGGTATGGCCAAAAGAACCAA | 144 | AAATCCACTCAACCACAAAACAAACCAACTTTTTTAATTAAA | W | W | W | A | GYSNP0690 |
| AGAGAGATTCAATAATTGAAAAGTGGTGTAATGAGATGA | | AAACAATTCCTAAAATGGTGAATATTCATGGTAAAAAA[T/A]T | | | | | |
| CTTGTTTAAAGCAGACAAAGGAATGAAA_NODE_1_length_ | | AAGTGACTTTGCTAAAACTACTTCAAGAGCGTCAGCTTAGAA | | | | | |
| 636_cov_81.924530 | | GCTTAAAAACGCCTCCATGTCATCTCTGTTTTATACA | | | | | |
| RAD_kmer_0002394_1_TGCAGGGATTGTGTGCTGCTTTCAG | 200 | TCAGATTATCAAGTGATTCAAACTTTGCAAGAAACGTAGCTG | T | W | T | W | GYSNP0691 |
| AAAGCAAAAATACAGGAAAATCATAAAGCCCCCACATAA | | GTGTATTAGTAGAATCAGGAGCACAAAATCAAACCCAT[T/A] | | | | | |
| TACCAGATCCCTGCACACACATAGAAC_NODE_3_length_432_ | | TAAAAGGTAATAATATGGTAATTTTGTTACTTGTTAGTTGTTA | | | | | |
| cov_44.891205 | | CTTACTTTTAGATTGGTTAGAGAAGAAGAATTAGTTC | | | | | |
| RAD_kmer_0002405_1_TGCAGGTATAACTCCTAGCCATC | 345 | CTTCCTGTTTACTTTTTGTAGGCTTTTTTTTTTCTTATCGGGTT | G | K | G | K | GYSNP0692 |
| TTGAGTGCCGCTCGCCAGTCTTCTCTTTCAAGCAATCCATT | | ATTTGTGACCTCAGAAACTAAATACCAGCTTCATGC[G/T]AAG | | | | | |
| AACAACCTACTAGAATGTCCAACCA_NODE_1_length_567_cov_ | | GAAGTTGCTCATGATTTGGATCTTACAAAGTATGACGGCATT | | | | | |
| 141.194000 | | CTTTGTGTTAGCGGAGATGGGATTTTAGTTGAGGT | | | | | |
| RAD_kmer_0002407_1_TGCAGGGCTTTGTAGGATGGCTTGT | 198 | CAGTTCTCAAGAAACCGTCATACCTCACGGTTGAAAACCTGA | R | R | R | A | GYSNP0693 |
| GTTTGTAGTTATTTAAGGGACATGTGTTTAAGTGATCATTT | | GCCGGGAACCAAAACTTTCCAGTCTCGAGGGCTCGATA[A/G] | | | | | |
| GTGGGAAAATCATATGAAGAAAAGA_NODE_1_length_517_ | | CAAGACACAATCGAATCAACGGATGGTTGAGATGAAACCTTC | | | | | |
| cov_148.172150 | | ATCTTCTTAATATCATCATCATCATGTTCAAGATCATG | | | | | |
| RAD_kmer_0002410_1_TGCAGGATCAATTGTCAGTTGTCAT | 87 | TAAAAAATTTATATAAAAAACATAGTGCATATTTTATTAAAC | G | T | T | T | GYSNP0694 |
| AACCACAAGAGACTCAAAACACATAGGTTCACAAACTTA | | AGGTTAAATCGTGTTATAGACAGGTCAAGAATTGACTG[T/G]T | | | | | |
| AAAGAACATGACATGATAATATAATAT_NODE_8_length_215_ | | CCTAGTTTTGGTATCCAAAATTGTTACAAATATACATAATACA | | | | | |
| cov_33.474419 | | TGAATTTCAGTAGGTTAAACCTGCTAACCATTTAGG | | | | | |
| RAD_kmer_0002417_1_TGCAGGAAAACAACTGCTGGGCGT | 385 | ATATATTGTAGGTTGATTGGGATGAGCCGGAGCTGTTACAAA | G | G | T | G | GYSNP0695 |
| ATGAGGGTTAACTGAAAAGCGTTGTGGAAGGGCGAAACC | | ATGTGAAGCGCGTAAGCCCATGGCTAGTTGAATTAGTG[G/T]C | | | | | |
| ATCTTTTGGTAAATCTGGGGATCGAGGT_NODE_1_length_508_ | | AAACATGCCACTAATTCATCTCTCACCCGTTTCTCCACACAGA | | | | | |
| cov_75.137794 | | AAGAAGCTAAGATTACCTCGATCCCCAGATTTACCA | | | | | |
| RAD_kmer_0002419_1_TGCAGGTAGTTATAAGAAACATGTT | 132 | ATTACATATGTTTTAACTGTGTTATTTTGTTCAAAAAAGGCTA | T | W | T | W | GYSNP0696 |
| AATTGCGTTAGCATACTTTATAGTATTCATTCCTTAGAAG | | TGTGATAGAGCTAATTTAAAAGCTTGGTTTTAAAAAG[T/A]GT | | | | | |
| AAGAATGCAAGTACTAAGAAGGAAAG_NODE_1_length_388_ | | GCGCCTAAGATGCGAGGCGATGGTGGCAACAACCAAAGCAC | | | | | |
| cov_45.644329 | | CTCAGGGTATGGAGGCGGCGCTTCTTGCAATGTAGAT | | | | | |
| RAD_kmer_0002423_1_TGCAGGGGTCAAATTACCAAAGAA | 155 | CTGCAGCAAAATGAAATGACGTCTAAGATACAGGGCAGATC | K | K | T | G | GYSNP0697 |
| GGTAATTCGTCTGGCATATCATGTCAATTTTTTTCGTGCGA | | AGGAAAGGTGGTGGGGGTTAACCTACGGCATTTATACCC[T/G] | | | | | |
| ACTGAGATTTATGGTCTTAGCAGTTA_NODE_1_length_446_ | | TCAGCCCTTCACTAGATTAGTGCATTAGGACATGGGCGTTGG | | | | | |
| cov_161.553818 | | AAGTGTAAGGACCAAGGAGTAAGAGAAGGGTATGATGA | | | | | |
| RAD_kmer_0002425_1_TGCAGGCTACGAGCTGTTCTTTGAG | 300 | CATGAGAGATCGGAACTGGAGCAACTTAAGCAAGATGTTGCT | C | M | M | M | GYSNP0698 |
| GTCTGCTATTTCAGGATTCAATCGTGACAGTAAATCCCTTT | | AATGCTAACAAGCACATACAGAACATCACTAAAGCTCT[C/A] | | | | | |
| CCTCTGGGGTTAAGTGATCAACAAG_NODE_1_length_540_cov_ | | GAGAAGAAGGTTTCGGAGGCTTTCTATTGCCAGCTTGTTGAC | | | | | |
| 213.233337 | | TTATGTCAATCTTCGGATCTAACTGTTTTTATGAATTG | | | | | |
| RAD_kmer_0002425_1_TGCAGGCTACGAGCTGTTCTTTGAG | 356 | CATACAGAACATCACTAAAGCTCTCGAGAAGAAGGTTTCGGA | Y | Y | C | C | GYSNP0699 |
| GTCTGCTATTTCAGGATTCAATCGTGACAGTAAATCCCTTT | | GGCTTTCTATTGCCAGCTTGTTGACTTATGTCAATCTT[C/T]GG | | | | | |
| CCTCTGGGGTTAAGTGATCAACAAG_NODE_1_length_540_cov_ | | ATCTAACTGTTTTTATGAATTGTAAAATTGCAGCTGAAGTTAC | | | | | |
| 213.233337 | | TTGCAAACGTACAGACTCAAATTGATCAGGTCAAA | | | | | |
| RAD_kmer_0002434_1_TGCAGGGTTACATGGGCCACTCTAG | 192 | CACAATAAAGCCCCTAGGGGCTTTATCCACACCCCCAGCCTT | A | A | G | R | GYSNP0700 |
| ATTAGCAAAATAGAAGAAACTATTGATGCAAGTGCCGAT | | AGAATGGCCTAATTTCTCACCCAAAATAAACCTGGTTG[G/A]G | | | | | |
| GGTCCTTTGCTCCTATGTCATACTGGC_NODE_1_length_407_ | | TTTTGTTATCACTAAAAGAACATACTTATACATAACCTTTCTT | | | | | |
| cov_138.012283 | | TTTAACGGCTAACACACACACCTTTTAAAATCTACT | | | | | |
| RAD_kmer_0002441_1_TGCAGGCTGAAATAACTGAATTTGT | 455 | TATGTACTTCAGTAGATAATTAAAAATCTTTAAGTGTATAAG | C | T | Y | T | GYSNP0701 |
| TCATCAACCTCGTCTCCTTGCCAATCCAAACTATTTAAAA | | AGTAAGCTAAAACAATATGGGTTTCTGTTCACAGTTAA[T/C]A | | | | | |
| AAGAAACAATGCACAAATGTTAAAAG_NODE_1_length_651_ | | AATAAACAGGAGGACCGGGATCAAGTTGTAATTCTTTTCCAG | | | | | |
| cov_107.821815 | | GATATGCATGAAGTTGTGACAAGAGACATAATGGAAG | | | | | |
| RAD_kmer_0002446_1_TGCAGGTTCTTAGCATACAACAGCT | 467 | GTGATTATTGTAACAATATTCTTTAGCACCCAAATTTTTCATT | W | W | A | W | GYSNP0702 |
| CTACAGAATCAGTACTATGTATTTTGATGACAAATACGGC | | AAAAATGTTAGAAAGTGAACAAAAGGTGTTTCAGTTC[A/T]A | | | | | |
| ACACATAGTCTTTCTGCAGATGTATA_NODE_1_length_530_ | | CCAACCTGACCCGCTTTTGAACCATTTACCAACCCGCCCATTTT | | | | | |
| cov_55.133961 | | GCCACCTCTAATATCTTGATGCCAGAAATGAGATTT | | | | | |
| RAD_kmer_0002453_1_TGCAGGTTAACGAGGATGTCGAGGT | 110 | CTTTGATACACTGCTGATAGCCCGTTGTCTTTTTCAGAAGAAA | R | G | R | G | GYSNP0703 |
| CAATGCTTGAGTGCCATCGTAATCAATGTCGAGCCATTGG | | GAACGATTTGCTTATCGATCACTTGCAATTCTTTATG[G/A]AT | | | | | |
| AGCTGCTAAACGGTTAGACGCTATTG_NODE_1_length_590_ | | CTTTTGATCTTCCCTTTCCAAATCCTTAGCTTTTCTCTCCATGT | | | | | |
| cov.154.472885 | | TTTTATGCATCGCTAACCTCCTACTCATTTCTTG | | | | | |
| RAD_kmer_0002453_1_TGCAGGTTAACGAGGATGTGGAGGT | 396 | CACCTATTCGGCTAGGAGAAAAGGGAACCGGTCCATCAGCG | Y | T | Y | T | GYSNP0704 |
| CAATGCTTGAGTGCCATCGTAATCAATGTCGAGCCATTGG | | GTTTCTTCAGGTACATACAGAAGACATTTTAGAAGCCAG[T/C] | | | | | |
| AGCTGCTAAACGGTTAGACGCTATTG_NODE_1_length_590_ | | TGTTTAAGGATGTCACAAACCCCTTTTGGGTTCCAAACCAAC | | | | | |
| cov_154.472885 | | ATGAGAACCGCATAATCCAATTTAGAAGTTCACGTTCT | | | | | |
| RAD_kmer_0002458_1_TGCAGGGTGTCGACTTGGGCTGCAG | 212 | TATTAATTTGCGTCGTTTATATATTTCGTATTTTATAGGTGTTC | G | G | R | — | GYSNP0705 |
| GGTGCTCCGCTGGGACAAGGCCTGTGCCCACTTTGATATC | | GCGACGGAGTGGAGCCAAAACGAAGATATTATGGTC[G/A]AG | | | | | |
| TCAATTATTGCTTCTTTGGCTCCAAG_NODE_1_length_382_cov_ | | CGCGAACCGTGGCGAGCATAGAGTATAATAATAATAATAATA | | | | | |
| 106.494766 | | ATAATAATAGTAATGATGAAAAAAAAAAAAAAGAAC | | | | | |
| RAD_kmer_0002461_1_TGCAGGATTTAACATAATCAGCCAT | 375 | TCACCTTTTAAATCCCTCCTTTCAAGTTTTAACAAAACCAACT | Y | T | Y | T | GYSNP0706 |
| TCTATCTTTTCATTGATAATCGGCCTTTTTTTGTATCAAGG | | GTCTGATTATCATGATTACTAACTTGTGTTTAATTAA[T/C]AGA | | | | | |
| ATCAATAATCGATAATCATTAATCT_NODE_1_length_557_cov_ | | CTATAGTTTATATGCTTGCCATCTTCACCAAAGATATTTACTA | | | | | |
| 99.107719 | | TCATGATTTATATCATAAGTTATTTTTCATGTTG | | | | | |
| RAD_kmer_0002472_1_TGCAGGTTTCTTGCCATCTTGAGTG | 373 | TACCAAATAGTGAACATAATAGGAAAGGGGGAGAATAATAT | C | Y | T | Y | GYSNP0707 |
| ACAAAAGGTATGAAGTCGTGTTTGACCGCGTAGGGCAAA | | CGGCTTTTGGAGTCCTGAAAACGGCATCTTTAAGAAGTT[T/C] | | | | | |
| GCACCAACGACCGCATCAAAAACGTCA_NODE_1_length_632_ | | AATAATCGAACAAAGGATCTTAAAGCGGTCACATGGCCCGGT | | | | | |
| cov_135.860764 | | GACACTCATGTTATCCCTAAAGGCTGGGAGATCCCAAC | | | | | |
| RAD_kmer_0002472_1_TGCAGGTTTCTTGCCATCTTGAGTG | 568 | GCAAAAGGCGGGTTTGTTCAGTTCATCGATGCCAACACTGAC | K | T | T | K | GYSNP0708 |
| ACAAAAGGTATGAAGTCGTGTTTGACCGCGTAGGGCAAA | | CCGCGAACCAAACAAGTTATCGTGACGGGTTTCTGTGT[T/G]G | | | | | |
| GCACCAACGACCGCATCAAAAACGTCA_NODE_1_length_632_ | | ACGTTTTTGATGCGGTCGTTGGTGCTTTGCCCTACGCGGTCAA | | | | | |
| cov_135.860764 | | ACACGACTTCATACCTTTTGTCACTCAAGATGGCAA | | | | | |
| RAD_kmer_0002474_1_TGCAGGAGAAGAAATTAAAAGTCA | 139 | TCCCAATTTTACTACTAACTTTTTTGAGGTCTCCAAAATATCA | A | R | G | A | GYSNP0709 |
| AAATGATTATCCTACAGTTGGAAATCAAGAAATATTGATT | | TGGGCCCTTTGAATCAGTGGCCCTATATCCCGTGGCA[G/A]CA | | | | | |
| AGAAGTCATACGTTGTCACGGCCTCCG_NODE_1_length_331_ | | AGGCGTTTATTGATGAAACTGATTAAGATTTGAATGGTCTGA | | | | | |
| cov_16.972809 | | GATTATATGCAGCTAAGAAAGCAAAGCATTTGAGAG | | | | | |
| RAD_kmer_0002476_1_TGCAGGAAATGTGCATATTATGAAA | 531 | AAGTTATTGGCTTTTGATTTTACAGTTTAGGCTAATTGGATCT | W | W | W | W | GYSNP0710 |
| AAGAAAGTAGGAGGCTACATTACTAAAGCTTTAATAAGC | | CATAATAATCTATGATAAGATAGTGCCCAGTTATTTA[A/T]AA | | | | | |
| AAATATTTTCACAACAGACAGTCAATG_NODE_1_length_605_ | | GTTATCTCATTGACTGTCTGTTGTGAAAATATTTGCTTATTAA | | | | | |
| cov_70.803307 | | AGCTTTAGTAATGTAGCCTCCTACTTTCTTTTTCA | | | | | |
| RAD_kmer_0002481_1_TGCAGGTGAAAGATTCAGTGAGATT | 99 | AACATCGGCCAACTCGGCCTTGTACTCGGTCAACCCGGCCTT | G | G | G | A | GYSNP0711 |
| GTGGGTAGTCTATACTACATGGTTCTTGAGGTCCTAGAAA | | GTACTCGACGGTCAAAATCGGTCAACTTCGGCCTACTC[G/A]G | | | | | |
| GAAATTATGGCCCAGAATTTGATGTA_NODE_1_length_522_ | | TCTTGTACTCGGCGAAGTTTGAACTTTAAACATGTATCATTTA | | | | | |
| cov_149.498077 | | AATTATGTTTGTTTTGACATGGATTATGCTTCTTTT | | | | | |
| RAD_kmer_0002484_1_TGCAGGCCATACATATAGAGCTAGA | 132 | AACTTTACTTTTATAAAAAGATTAAGAAGGGTGACCTCA | K | K | T | K | GYSNP0712 |
| GATGGTAATTAGCAGCAGCTGGCCGGAACCGGTGGTGCG | | TGATGGAGGGTTCGTGGGCCATTTAGAATGATCTCTGA[T/G]A | | | | | |
| AGTGCAATCACTCTCAGACAGCGGAAT_NODE_1_length_582_ | | GAAAGAGGGAGGAAGTGAAGGAAGAAGTAATCGCTCCAGTC | | | | | |
| cov_174.324738 | | GAGCTTGGCCCCTTTCTCCACCCCGAGGCGGCTTCCGT | | | | | |
| RAD_kmer_0002487_1_TGCAGGCAGTGGATAACACAACCG | 164 | GTTTGAATAAAGCGCTTTAGGAGATTGTATCCATTAAAAATA | T | T | C | T | GYSNP0713 |
| GATTTTCAAATTTTATGTAATTTTTTCCCTTCCAAAATCTC | | GAGTTTAGATGAGTTTTAACCCATTTGACCCGTTTGAG[C/T]T | | | | | |
| ATTTACCAAGACTCAAAACTTTGTTT_NODE_1_length_586_ | | AAAACACAATCAAAATCGCCCACTATAAGTAAATCAGTCAAA | | | | | |
| cov_106.563141 | | ACTGCCACATCTATGATCTATCCTAACCCGCCCACAC | | | | | |
| RAD_kmer_0002490_1_TGCAGGTTTGGCTTTTGTCCCCTTTT | 199 | ATAACACATACTTTAAGAAAGCATTTGAACTAAGACAAAAAT | A | T | T | C | GYSNP0714 |
| GTCACCTTTGGCCCCTCATGTTTGGTACTTTAGTGACTTGG | | CAAACGAAATAAAGACGAAACCTTAGCATGAAAAAAAA[T/A, | | | | | |
| CAAATTTGGTCCTTCTTTTTTAGT_NODE_1_length_412_cov_ | | C]AAATTCGGAGAAGATAACATCATAGAGAGATAGAGAGAGT | | | | | |
| 66.475731 | | GAAATGTAAAAATCACAAAGGGTACCCGATGGAGATACAA | | | | | |
| RAD_kmer_0002498_1_TGCAGGAGCAAGAACTTCTAGATCT | 216 | TTGTTTTGAGAAGTTTTTGAATTGTGATATGAATTATTGTGGT | A | T | W | T | GYSNP0715 |
| TTAATCGGTTGATACTCCATCCCAAAAACTCGTTGAACAC | | GCTGGTGTGCTTCCGAATAATGTGCATCAAATGCACC[T/A]TG | | | | | |
| CATCAGTCATTGACAGTTTTAGGCAT_NODE_1_length_429_ | | TTGATCTTCCTGGACCCTTTGTGTTGCAGGTATTTTGCGCGTT | | | | | |
| cov_41.794872 | | TTAAGTCTCGGTTTCGTTCTTGTTTGATTATTTTG | | | | | |
| RAD_kmer_0002503_1_TGCAGGTGATATATTAAAAATACAA | 394 | AACAGACGTCCGGTTATCGAAAAACTGACAACTCCGGGATTT | A | T | T | T | GYSNP0716 |
| CCTTTCCCTCTAACTTTACTAACTGACTTATTTAGTTTGTT | | AAACTAACAACTCCTTTGGAGTTTAAAGTTGTGTCACC[T/A]A | | | | | |
| ACTAGACACAACACTATAATCTTCT_NODE_1_length_611_cov_ | | CAGGTGTGATAAACCGAAATATGGGTGGGATTGGACTCGGTA | | | | | |
| 117.21771 | | TAGTTGCAGCACTTGAAGATGTTTCGGCCAAGAAGGT | | | | | |
| RAD_kmer_0002505_1_TGCAGGCTTCAGGTATCTATGCAAC | 123 | GTAATAATAATGACTATTTGTAACATTGACTATGTAAAAGAT | A | A | A | T | GYSNP0717 |
| AAGCCGGATTTGGATCATATCAACTAATGGTTTGACCCGA | | ATATATGAAGTTTGCAGATCAATAAAGAAAATAAAACA[A/T] | | | | | |
| GTCCATGACCGAACTAAGTGGATTGT_NODE_1_length_568_ | | GATCTACCGAACAATTTATGGAACTATGTTATCTAACATGTAT | | | | | |
| cov_173.619720 | | ACATGTGTCTGATGATTGCATAGATTTTCATTTTTTA | | | | | |
| RAD_kmer_0002505_1_TGCAGGCTTCAGGTATCTATGCAAC | 456 | TTGAATGGGTCAGCATTTAGTTTATTTATGTAATGTGCTTTAG | S | C | G | G | GYSNP0718 |
| AAGCCGGATTTGGATCATATCAACTAATGGTTTGACCCGA | | TGTTTGATTGGGTCATGGCCCATCTATATGTGTTAGT[G/C]TG | | | | | |
| GTCCATGACCGAACTAAGTGGATTGT_NODE_1_length_568_ | | ATGATTGGTCAGATAATGATCCATAAGCTAGCTAACGGGTAG | | | | | |
| cov_173.619720 | | ATCACAATCCACTTAGTTCGGTCATGGACTCGGGTC | | | | | |
| RAD_kmer_0002516_1_TGCAGGGAAACCATGAGTGCTGCTT | 399 | TTCAACGAATCTACCACCCCAAAACCGGCTATAATAGTCACC | T | C | T | C | GYSNP0719 |
| TTTTCGGCTATTCTATAGTAAAGTTCTCCTAGAGTTGCGCC | | GCATTAAACGTTTCACATATTCAAGCCTCAATTATATG[T/C]G | | | | | |
| AGTTTGAACCCATGCAGTTTCTTCT_NODE_1_length_595_cov_ | | CCAAAAAACACAAATTATTAATGAAAACCAGAAGCGGTGGT | | | | | |
| 95.826889 | | CATGATTACGAGGGTCTATCATACGTTGCTGACCACCG | | | | | |
| RAD_kmer_0002522_1_TGCAGGTGTGTGATTGGTTAAACTA | 483 | AATGTATCTTTAGCTTCCCTTGTTGCATCAGGATCTTCAAGAG | T | A | A | A | GYSNP0720 |
| TACAATTGTATCCATTTGATAAAGTTAAGATGTTTGCTAA | | GGAACACGTCTATCAGTAAATGCAGTGCATTTTGACG[A/T]AC | | | | | |
| CGTTTCTTTGTAGGTTGCGAACTCGG_NODE_1_length_552_ | | ATCCGAGTTCGCAACCTACAAAGAAACGTTAGCAAACATCTT | | | | | |
| cov_153.382248 | | AACTTTATCAAATGGATACAATTGTATAGTTTAACC | | | | | |
| RAD_kmer_0002523_1_TGCAGGTTCAAATCATGAAACATCA | 331 | CAAGAGGTAATCATGCATATGTGCATTTTAAAACTGTTTTTTA | T | K | T | K | GYSNP0721 |
| TAGGTTAAAATGCGATAATGCAGAAATATTCATAATCTAG | | AATTGGTACTGTTACATTGAAATATTTTTTATTGAAG[T/G]GT | | | | | |
| GAAGCAGACACGCTTAGCAGACGGAT_NODE_1_length_616_ | | ATGATATTTGTATTCCGAATTTGTCTATCTTGACAATATAGTC | | | | | |
| cov_82.144478 | | CTATTTTGTTTCGTTGGTTTCATGTAATTTAACTT | | | | | |
| RAD_kmer_0002523_1_TGCAGGTTCAAATCATGAAACATCA | 385 | TTACATTGAAATATTTTTTATTGAAGTGTATGATATTTGTATT | Y | Y | T | T | GYSNP0722 |
| TAGGTTAAAATGCGATAATGCAGAAATATTCATAATCTAG | | CCGAATTTGTCTATCTTGACAATATAGTCCTATTTTG[T/C]TTC | | | | | |
| GAAGCAGACACGCTTAGCAGACGGAT_NODE_1_length_616_ | | GTTGGTTTCATGTAATTTAACTTCTAAACAGGCGAGGTATCTG | | | | | |
| cov_82.144478 | | GCATCTATTCAGCACCGGAATATTGTGACTCTTT | | | | | |
| RAD_kmer_0002529_1_TGCAGGCGAGAAAAACAACTAGCA | 122 | AGTTAGTTTTGAATGTTAAGTGATCTAATATGAAATTTATTCA | T | T | T | A | GYSNP0723 |
| AGTGCTTCATAAGTTGAGTATTTTTGGAACGTCGGTTGCC | | TTCATTTGTGAAACTATATGATTATTAGTATGTGTTA[T/A]ATG | | | | | |
| GCAATGTCTATGAGCCTGTTTATCAAA_NODE_1_length_623_ | | GAATGCCAAAGTATTGATAGCATTTTTTCATTGAAGTTAAAA | | | | | |
| cov_108.776886 | | AGGGGGCATTTGATGTATAAATTGAAGTCTTTAAT | | | | | |
| RAD_kmer_0002539_1_TGCAGGTCCCAGTGCTTCGATCTAT | 334 | AATTACACCAATGGCACTTCTATAGCTGGTAAATTCTGGATG | C | — | G | S | GYSNP0724 |
| AAACATCGATTTCCGTAACAGCTTGAAACCTAACAGGTTT | | CATAAAAAAAATAGTAAACAGTCATAGTCATACTGAAG[G/C] | | | | | |
| CCCACAGGCTTTTCATCGCAAATAGT_NODE_1_length_672_ | | AAACTCAGCAATATAAGACACCAAAAAACACCCAATGCAAT | | | | | |
| cov_76.909225 | | GATAGACAAAATATCACAACTACATGAAAACATCACTCA | | | | | |
| RAD_kmer_0002539_1_TGCAGGTCCCAGTGCTTCGATCTAT | 405 | ATACTGAAGGAAACTCAGCAATATAAGACACCAAAAAACAC | A | — | A | R | GYSNP0725 |
| AAACATCGATTTCCGTAACAGCTTGAAACCTAACAGGTTT | | CCAATGCAATGATAGACAAAATATCACAACTACATGAAA[A/G] | | | | | |
| CCCACAGGCTTTTCATCGCAAATAGT_NODE_1_length_672_ | | CATCACTCATGAAAACATCACAACTACAAAGATCATTTCATA | | | | | |
| cov_76.909225 | | ACAATCGAAAGCAACTAAACAGAGCTAATTAAATCAGT | | | | | |
| RAD_kmer_0002542_1_TGCAGGGATCAGAAAGTGGGCCTC | 202 | GAGCGTTAACAAAGGAATTTAGGTCGAGACGCGGACGCCCG | — | G | A | G | GYSNP0726 |
| GGTAGGCTCCAGCTGCGTCAGATGGGAGCCCCGTCTGAAC | | GGAGTGAGCATGGAAAATATAATAATATAATATAATATA[A/G] | | | | | |
| TGGGCTCTTGATCTTGTTACTCTTATG_NODE_1_length_413_ | | ACTAATAATAACATTAAAAATAATAAGTAATAGTAGTTATTA | | | | | |
| cov_105.825668 | | TTAAAATAATTGTAATAAATAATAATATATAATGTAAT | | | | | |
| RAD_kmer_0002545_1_TGCAGGTGATTATCTCAACATAAAA | 130 | AAGGTTAGCTATAGTTGGTTTAGGTAGCATTTTTGTACTGGAA | T | T | T | C | GYSNP0727 |
| GACAGGAGCCATCTTTAATAGCAGGTGTTCAGTTGTCATA | | GTTAAGGGCGATTTGTGTCTTCAGATTACATATTGCT[T/C]CCT | | | | | |
| ATATGTTGTTGATCAAACTCTGTAGT_NODE_1_length_524_ | | ATTTGTGAATTTAGATTGTTAAAATATTGCTTTTGATTCAGAA | | | | | |
| cov_102.082062 | | ATTGTGCCGGACTAGCAAATTTATATTTTTTATA | | | | | |
| RAD_kmer_0002547_1_TGCAGGTTTTGAAGAGAGATTCCAG | 149 | AGATTCATCGTAATCTGCCTTCGTTATATGTTGATTTTGAGGA | M | A | M | A | GYSNP0728 |
| AAGGAAGCTAGTCTTTGCTCATCGTCCATTCGTCCTTCTTT | | AACACAACCTTGGCAAGTATGGCACCTCCCACCCATG[A/C]TG | | | | | |
| AGTCAAGGTAATAACTAACACGCGC_NODE_1_length_372_ | | AATACATGGATAAATTCTCTGGCATGTACTCTGGTGCCTGCAT | | | | | |
| cov_48.475807 | | TTCAAAATCCCGCACAATATTATATTAATTTTGTA | | | | | |
| RAD_kmer_0002549_1_TGCAGGAAGCTTTGATGATCTTGTT | 299 | TTTAGAGACTTTCTAAGGGTTTTAGGAGTTTTTTGAAGCATGT | R | G | G | R | GYSNP0729 |
| CTCAATCTCTCTATTGGGGTAATCATATTACACAAATAAT | | TTGACAAATAGGTTAGGTAGCAAACTCATATAAGTTC[G/A]CT | | | | | |
| TTGCATATGTTTTTAGATTGATTTTT_NODE_1_length_409_cov_ | | AAGGTGGCAAGTGAACTCAAGTGAGAAGCAAACTTGCCTAC | | | | | |
| 45.466991 | | GATAGATATTGTTCGCTCGAGTATATATACTGTTATT | | | | | |
| RAD_kmer_0002554_1_TGCAGGATGGGAATGAAGTGTTCTT | 258 | AATCCAATAAAGAAGAATAAATCCAACAAAAAGTTGCATATT | G | A | A | A | GYSNP0730 |
| CAGGATCAAGCGCAGTACCCAGCTTAAGAAGTTAATGAA | | CTGACCCATTCGACCTATCGTTTGAAAAACAAGACCTG[A/G]T | | | | | |
| TGCCTACTGTGATAGGCAGTCTGTGGA_NODE_1_length_450_ | | TGTTTTAAACAATCAAATAAACAAGTGAAATACTTACAGCTG | | | | | |
| cov_126.315552 | | CTTGATAACTAATATATTACCTCTTCAGGAGTCTGCT | | | | | |
| RAD_kmer_0002559_1_TGCAGGGACATCATACCCAAGTCCA | 530 | TTGTGCTGATATAGTTGCATTTGCAGCTAGAGATAGCTTTGAA | T | T | K | K | GYSNP0731 |
| CCTGTCTGCAATAACAACAATTATACACTGTTGAGTCTTG | | ATAGTAAGAAAAATGAAAACTTATAGCCCAAAAGCCT[G/T]G | | | | | |
| GTGCACAATCAGAAAAGCTTGGCCCA_NODE_1_length_637_ | | TCCTAAACAAATATGCAACTTTTGGGCTCAACCAGGCTAACT | | | | | |
| cov_131.142853 | | GGGCCAAGCTTTTCTGATTGTGCACCAAGACTCAACA | | | | | |
| RAD_kmer_0002565_1_TGCAGGGAATCTAAGTCATGATAGC | 511 | TCGTTTGTTGAAATCTTCTAATATTGTTTGTTGGTCTGCCTTTT | C | M | C | M | GYSNP0732 |
| ATTGCTCTCGAATTGTCGATTCCATCTGTGGAATAATTTTT | | TCAGCCCCTGTGATCAAAGCATGAATAATACAAGAT[C/A]TAT | | | | | |
| TTAATTAAAACTATTTATGAACATT_NODE_1_length_610_cov_ | | AGTACTCTGGTTGATATGAAAAACACTTCAAATGTTCATAA | | | | | |
| 133.775406 | | ATAGTTTTAATTAAAAAAATTATTCCACAGATGGA | | | | | |
| RAD_kmer_0002567_1_TGCAGGAAAGTAATTCAGATACTGC | 389 | GGCACCAGGGTCACAAGGATCAGATGGCACAAAGAAAGCAG | G | SS | | G | GYSNP0733 |
| TCAAACTTAAATGACAATTAATAGTGTTGATAAACTAATT | | AGGAGCTAAAAAGGAAAGCTAGAGCAGAGAGGTTGTTTA[C/ | | | | | |
| ACCTGAGTGCCCTTGCTTTCTTTTTC_NODE_1_length_641_cov | | T,G]AGCATAAAACTTTTTACTGCATATTTCAAATTTAATTTCC | | | | | |
| 118.243370 | | AGACTCTATACTCATCACTTTTTATTGTATTTCTGTGTTG | | | | | |
| RAD_kmer_0002567_1_TGCAGGAAAGTAATTCAGATACTGC | 501 | TTAATTTCCAGACTCTATACTCATCACTTTTTATTGTATTTCTG | Y | C | C | Y | GYSNP0734 |
| TCAAACTTAAATGACAATTAATAGTGTTGATAAACTAATT | | TGTTGATCAGATTTGGTATCACTAAGTCAACACCTA[C/T]AGA | | | | | |
| ACCTGAGTGCCCTTGCTTTCTTTTTC_NODE_1_length_641_cov_ | | GGAAGAGGAGAAAAAGAAGGCTAGACTCTCCAGGTTTGGAT | | | | | |
| 118.243370 | | CACCTTCTAGTGCTGATCCTAAAGAAGAAGAGAAAA | | | | | |
| RAD_kmer_0002568_1_TGCAGGAAGAAAACACAGCACCAA | 113 | TAAAAAATAATAAATTTGAAGTTAAAAAGGGAGCCTACAATT | R | A | S | — | GYSNP0735 |
| CACCAAAGCAACTCCAGCGACGACACTATAACCCAAATG | | GTCAAGCCTCTTTTGACAAAAGCAACTGTGAAACCGCT[T/A,C, | | | | | |
| TTGAACGAATGAAACAAGATGAAGGCTA_NODE_1_length_ | | G]GTGATTTTATGAAACAATTAAATTGCTCTTTAACAAAAACC | | | | | |
| 634_cov_111.077286 | | ACCATGGTTTTGTAAAAACCATTATAAAACCCATTTATG | | | | | |
| RAD_kmer_0002568_1_TGCAGGAAGAAAACACAGCACCAA | 505 | CGATCGGAATCGACAGAATGCAAGTTGGTGATTGTTAGGGTT | C | T | C | C | GYSNP0736 |
| CACCAAAGCAACTCCAGCGACGACACTATAACCCAAATG | | CTACTGTAGGTTCTCACGTTGGCATAGGCATGGATCAA[C/T]G | | | | | |
| TTGAACGAATGAAACAAGATGAAGGCTA_NODE_1_length_ | | AAATGTTGTCAGCGTGAAACTAATTGCCGGCGCCGCCGCCAT | | | | | |
| 634_cov_111.077286 | | CTCGGCTGCAAACCACCATTGTAGCCTTCATCTTGTT | | | | | |
| RAD_kmer_0002572_1_GCAGGACTTCACGAGGGATGTGCA | 462 | AACCGGTTTCCGTTGCTCAAGACTGCGTATGATGGGGAGAAG | Y | T | Y | C | GYSNP0737 |
| AAGCATTCCCATTCAAAAAATCTTGTAGCTTCGAAAGGTT | | AATATTTTCAGTGCGGTATTATTGGAACCGGGAATTTT[C/T]A | | | | | |
| TAGCTCGTTTCCAAACTTGATGGTGC_NODE_1_length_558_ | | ATGTTCAATTATATGGTCGGTCTTATGTGTGCACCATCAAGTT | | | | | |
| cov_156.786743 | | TGGAAACGAGCTAAACCTTTCGAAGCTACAAGATTT | | | | | |
| RAD_kmer_0002573_1_TGCAGGTTTGGCTTTTGTCTCCTTTT | 92 | TCCATACCAGAAACTTATCAAATGCTAAAGCTCATCAAATGA | A | W | W | W | GYSNP0738 |
| GTCACCTTTGGCCCCTCATGTTTGGTACTTAAGTGACTTGG | | AAATCAGCAAACTAACACATGTTTTTCAAAACCCCAAA[A/T]A | | | | | |
| CAAATTTGGTCCTTCTTTTTTAGT_NODE_1_length_233_cov_ | | GCCCTAAACATAAAATACTTATGGAAATTAGATCTTCAAAGG | | | | | |
| 11.334764 | | AAGCCATAATTGAAAAGCAAATCTAAAATCAACAGAA | | | | | |
| RAD_kmer_0002575_1_TGCAGGATGACTATTTGATATATTG | 396 | TCTAACAATATATCAAGAACCCAAACTAGACGCATCTCACAT | W | W | T | T | GYSNP0739 |
| CTTGAATTCAAAGTAGATGTGAGATGCGTCTACTTTGACT | | CTACTTTGAACTCAAACAAAATATCAATGAACCCAAAC[T/A]A | | | | | |
| TTTGGTATTTTGTTTGAATTCAAGG_NODE_1_length_479_cov_ | | GATGCATCTCACATCTACCTTGAATTCAAACAAAATACCAAA | | | | | |
| 69.929016 | | AAGTCAAAGTAGACGCATCTCACATCTACTTTGAATT | | | | | |
| RAD_kmer_0002587_1_TGCAGGGACGACGAGATCAACCCC | 482 | AGTGTAGATCAGACCTCACAGGTCACTGGCCAGATGTTTGCA | C | C | T | — | GYSNP0740 |
| ATCACAATGATGTTACTAGATCAAAAAGACGACGATGATT | | TCTGCTGCGATTCTTGAACCACTAGAAACCACAACAGA[T/C]G | | | | | |
| CTCAACCTAACAAGGTTAGCTTGACAT_NODE_1_length_562_ | | GTGATGGTGGTTCCATGTCAAGCTAACCTTGTTAGGTTGAGA | | | | | |
| cov_90.197510 | | ATCATCGTCGTCTTTTTGATCTAGTAACATCATTGTG | | | | | |
| RAD_kmer_0002589_1_TGCAGGGCTTATTTGATAATAAGGA | 445 | GGAAAACTGTCTTTCGGGGAGGCTTTATCTAGGTATCTTTTCT | A | A | C | M | GYSNP0741 |
| GCTTCAGGCAACTGCCGCTTCACCTGCAGACCCCAAACAG | | ATAGCAGTTACTTCTCTCGTAATCTCGATACTATAAA[C/A]TG | | | | | |
| GTCTCACCCAAGGGTCTTCCTTTCCA_NODE_1_length_581_ | | CCAGTAATTTTATTTGTGTATTTGTCATTTTAGATGTAAAGCT | | | | | |
| cov_164.000000 | | CAAGATGTACCCATATGCCTCATGTATGGAAAGGA | | | | | |
| RAD_kmer_0002595_1_TGCAGGGATGTAACCTTAGATGCCT | 395 | TTTTCTCAAATTTATAAATTTAATGCATACCTTATAGTAAAAC | T | T | T | A | GYSNP0742 |
| CGTCCATTCTTCGATACTACAAGCGTACACTAGCTGCAAT | | TGTCTTTAATTATGGAACGATATGATTGTATATAACA[T/A]AA | | | | | |
| AGCACCACAAAATGCTAAATGTATAG_NODE_1_length_594_ | | TCTTGGGTTGCGGTGATATACTGCATATTCTTATAAGTACTTG | | | | | |
| cov_139.710434 | | AATAATTATCCCTAAAACTAGAAGCATTTAAATTT | | | | | |
| RAD_kmer_0002606_1_TGCAGGCAAAGCAATCCAAGAATG | 402 | TGAATTTATACGCACGTATAAAGTAGTTTGTGTTCTGCCAAA | A | T | A | — | GYSNP0743 |
| CCAACACGTGAAGCCGATTTATACCGGCCAACTTGTCCCT | | AGTGCATGTATATTATTGAATAACAAGAGTCTTTAAAC[A/T]G | | | | | |
| CCAGGTTGTGCAAAGTCTTTTGAAGTG_NODE_1_length_632_ | | GCAAACAAACAACTTTAAAACTAAACAAACCAATACACAAA | | | | | |
| cov_114.452530 | | AGACCGCATGTTTATTTTGCAACAAACTATCCTAAAAC | | | | | |
| RAD_kmer_0002606_1_TGCAGGCAAAGCAATCCAAGAATG | 472 | GTCTTTAAACAGGCAAACAAACAACTTTAAAACTAAACAAAC | T | C | T | — | GYSNP0744 |
| CCAACACGTGAAGCCGATTTATACCGGCCAACTTGTCCCT | | CAATACACAAAAGACCGCATGTTTATTTTGCAACAAAC[T/C]A | | | | | |
| CCAGGTTGTGCAAAGTCTTTTGAAGTG_NODE_1_length_632_ | | TCCTAAAACCTGGATTCCTCATGACCCATTCTTATTCTAACTT | | | | | |
| cov_114.452530 | | AACGATTGCTGCAAACGGTCACTTCAAAGAGCTACC | | | | | |
| RAD_kmer_0002616_1_TGCAGGTTTTGGTTTCCAGATATAA | 539 | TGTTAAAATAATACAACTTCTCAATGGTATTTGACAAACTAA | A | A | T | A | GYSNP0745 |
| GAACTAGCTAAGAAAATGTGCACTTTGACTTTTTTAAGTC | | CTCTTAAATTGTTTTACAAAAAAGTTTTGTGTCACCTA[T/A]CA | | | | | |
| AAACTGACTGATATGAAACTTGATAG_NODE_1_length_600_ | | AGTTTCATATCAGTCAGTTTGACTTAAAAAAGTCAAAGTGCA | | | | | |
| cov_124.279999 | | CATTTTCTTAGCTAGTTCTTATATCTGGAAACCAAA | | | | | |
| RAD_kmer_0002619_1_TGCAGGTATCGCACACACCAGGGCA | 239 | ACTTTCATCCTCATCTCAACCATCTACTTTCTTCTAGTCAATC | T | T | C | T | GYSNP0746 |
| GAAAACAATCTTGTAATCATTATCAAACTTCTCAAACTTG | | TCCCGTCCTTGACACTAACCAAATGCCGCTAGTAAC[C/T]GGC | | | | | |
| AACCAATTGCTTAAGGTCTCTTTGCC_NODE_1_length_604_ | | ATCTCGTACTACATCGTGCCCGCCGTTAGCGGCAGGGGTGGC | | | | | |
| cov_139.549667 | | GGTGTAAAACTATCCCCGACAACGCTAAACCAGAC | | | | | |
| RAD_kmer_0002619_1_TGCAGGTATCGCACACACCAGGGCA | 309 | CGCTAGTAACCGGCATCTCGTACTACATCGTGCCCGCCGTTA | G | G | C | G | GYSNP0747 |
| GAAAACAATCTTGTAATCATTATCAAACTTCTCAAACTTG | | GCGGCAGGGGTGGCGGTGTAAAACTATCCCCGACAACG[C/G] | | | | | |
| AACCAATTGCTTAAGGTCTCTTTGCC_NODE_1_length_604_ | | TAAACCAGACATGCCCACTCAACGTGGCGCAAGAAAACAAC | | | | | |
| cov_139.549667 | | GAACAAAGAAATGGGCAACCATTGGATTTCCAACTAGCC | | | | | |
| RAD_kmer_0002619_1_TGCAGGTATCGCACACACCAGGGCA | 425 | AACAACGAACAAAGAAATGGGCAACCATTGGATTTCCAACT | T | T | G | T | GYSNP0748 |
| GAAAACAATCTTGTAATCATTATCAAACTTCTCAAACTTG | | AGCCATCCCCAACAGAGGCGGTGTCATTCGTGATAACGC[G/T] | | | | | |
| AACCAATTGCTTAAGGTCTCTTTGCC_NODE_1_length_604_ | | GATCTTAACATTAGATTCACGGGTGCGACAACATGTGGCAAG | | | | | |
| cov_139.549667 | | CCTGCTGTTTGGCGGGTCGAAGAGGTCAACGGGCAACG | | | | | |
| RAD_kmer_0002622_1_TGCAGGCTGCAAGGCGGGAAATAT | 480 | CAGATGAGCCCGTCTTTGACCATGGCTTCACATTTAATGTAG | R | — | R | G | GYSNP0749 |
| AAATTGCTCCAGTTTACTTGAAACAAACGATCCCGATCAT | | GTTTGGTCACCACCATTTGCTGAATCGACTGTTTTTGA[A/G]C | | | | | |
| TCAAACATAATGGCCTGTGATATTTGC_NODE_1_length_589_ | | AAAGTATACAACAACAATCGTGACAGAAACGAGGCTCGATG | | | | | |
| cov_129.030563 | | CAGCAAATATCACAGGCCATTATGTTTGAATGATCGGG | | | | | |
| RAD_kmer_0002625_1_TGCAGGGTTGATGGTATCAAATTTA | 453 | ACCTTACATAAACTGCAGCAGACAAAAGTTAGCATCTGTAGC | T | T | T | C | GYSNP0750 |
| AACTGTTGGTCTTTTTCTTTGTTCGGTTTTTTACCATGTGTG | | ACATAGCCCTGTAGCATGAATAACTCCTCAAATAATAA[T/C]A | | | | | |
| TGTTATGCTAGCATCATCTTTTTT_NODE_1_length_523_cov_ | | ATTAAAAAAAGATGATGCTAGCATAACACACACATGGTAAA | | | | | |
| 138.927338 | | AAACCGAACAAAGAAAAAGACCAACAGTTTAAATTTGA | | | | | |
| RAD_kmer_0002626_1_TGCAGGATTTCAGAGGTTCGGAGGG | 237 | TGGCGCAAAAACACAAAGACAATCACCAATCGAGTCCCCCTA | A | G | A | A | GYSNP0751 |
| GGTAAATCTCATGTGATTAGTCGTCTTTTTATATAATGAAT | | AAGTGTAAGAAGCTCTAAGTCTCTGAGACAAAACTAAT[A/G] | | | | | |
| ATAGTATAAGTTTTTTCCTTGATTT_NODE_1_length_571_cov_ | | CTCTAATGTACCCTAAAAGTCCTTGACCTCAATCCTACGCCTC | | | | | |
| 77.809105 | | CACGTAGTCCTATTCTGGAAAATGTCCTCAGAGAGGT | | | | | |
| RAD_kmer_0002628_1_TGCAGGTTTACAATGGCCACACCAA | 337 | AAGTCTCTATTGTTTATTTTTGATTTCATACGCTAACGCTAGA | — | T | A | W | GYSNP0752 |
| GGAGCATAGAACTAAAACAGCTTTAAAATTTGCAGAGCTT | | GAAGTTATGCTTGATTTCATAAAAATCATAGGGATTT[A/T]AA | | | | | |
| TATTATAATTCTGATTTTGGGGATCA_NODE_1_length_471_ | | GCTCGAGACTTTCTTGAAACTGTCTTCTTTATGTTATACAGT | | | | | |
| cov_96.490448 | | TTCAAGGACTAGCAAGTGTTTCTATGATCCCCAAA | | | | | |
| RAD_kmer_0002631_1_TGCAGGTGCCCTTTGCCGACAACTG | 147 | TATGTACCTATATAAAACAGTTAGTTTATGTAGTGGTGAGTAT | K | T | K | T | GYSNP0753 |
| CAACCACAGAACCATGTTCGCGTGCTACTTTCAGCAAGCT | | ATTTAGAGACTATTGACACAACATGTTTCATAAATAT[T/G]AT | | | | | |
| GGAAGACATGTACCTACAAAACCATG_NODE_1_length_610_ | | GGACCTTTTCTTTAACTTTATATATACCACAAGCTTGCACTTG | | | | | |
| cov_161.704926 | | ATTGTTGTAATTTATTCTAAAACTTAATCAAGGTT | | | | | |
| RAD_kmer_0002633_1_TGCAGGAAATGGCTCCTGCAAAGCA | 234 | TACATAAGTTATCACAGCTAATTATATGATTTTGCTTATTCAA | R | G | G | A | GYSNP0754 |
| AATGAAAGTTATGCAAGAATTTCAGAAGCAATCTGCACA | | TATCATTTAATCACTTTCAATATAAATATCCAAAAAC[G/A]CC | | | | | |
| AATGGATATGACAGTAAGATACAGCAC_NODE_1_length_609_ | | CATTATCATTCACGCTACAAAACAGCTTTATTAAGATTACCTG | | | | | |
| cov_140.876846 | | GTTTGTTAGCTCATCGGTTTCATCTTCAGCTTCAT | | | | | |
| RAD_kmer_0002652_1_TGCAGGCGAGGGCGGGTCTCCCGA | 277 | TGATGAAGAGGCTGATACATGGAAATAAATGAGTATTGGATT | C | — | A | C | GYSNP0755 |
| AACTAAAAGAGAATAGGGACCATGACAACTTGCAACAAA | | AGAGTCGATTGTGGATTAAAGTCCTTAATCGGTTCGGC[A/C]A | | | | | |
| AGTTCTAAACAAACAAAAATAAGTAACA_NODE_1_length_ | | CTGAATTGACTAGCAACAGGTTTGTAGCTCAATCTGTGGAGC | | | | | |
| 462_cov_26.071428 | | GTATACTCTTCCCACTATTTGAATGGTGTCTGGTACC | | | | | |
| RAD_kmer_0002664_1_TGCAGGCTCAGCTGTTTATAGCCTT | 161 | TTGAAGGTAAGGAACGAAATGATTCTTGGGGAGATGAAGCC | A | A | R | — | GYSNP0756 |
| TTTGTTTTATAAGTTATTAGTGGTGTTGCTTGTTTAAACTT | | ACTATGTTTTCTTTGGTTTTAAATATAGATCTCTTAGTC[G/A]G | | | | | |
| TTAAAAAATAAATGTATAGTAGAAT_NODE_1_length_570_cov_ | | GGAGAGTTGTGTAAATTTTCCTTGTATGTGTTGTAGCCGGTGT | | | | | |
| 120.042107 | | TGTGTCTTACGTCCCCTTCCAGTCCGGTAGGGTGGC | | | | | |
| RAD_kmer_0002664_1_TGCAGGCTCAGCTGTTTATAGCCTT | 214 | TTGGTTTTAAATATAGATCTCTTAGTCGGGGAGAGTTGTGTAA | T | T | W | — | GYSNP0757 |
| TTTGTTTTATAAGTTATTAGTGGTGTTGCTTGTTTAAACTT | | ATTTTCCTTGTATGTGTTGTAGCCGGTGTTGTGTCTT[A/T]CGT | | | | | |
| TTAAAAAATAAATGTATAGTAGAAT_NODE_1_length_570_cov_ | | CCCCTTCCAGTCCGGTAGGGTGGCATTCTTTGTTAATGAAGTT | | | | | |
| 120.042107 | | AACAGTTCAAAAAAAGGGGGACATGGACCTGGTT | | | | | |
| RAD_kmer_0002664_1_TGCAGGCTCAGCTGTTTATAGCCTT | 333 | ATGAAGTTAACAGTTCAAAAAAAGGGGGACATGGACCTGGT | T | G | G | — | GYSNP0758 |
| TTTGTTTTATAGTTATTAGTGGTGTTGCTTGTTTAAACTT | | TTGTTACAGAAAACCCTAATTTTCTTCATGTAATGTTAA[G/T]T | | | | | |
| TTAAAAAATAAATGTATAGTAGAAT_NODE_1_length_570_cov_ | | TGTTTAAGCTGGCCATTCAAGGGCATAACAAGGCCAAACTTG | | | | | |
| 120.042107 | | CGAGAGTTATTAGATACGTGGTTGTATAATTGTCTT | | | | | |
| RAD_kmer_0002665_1_TGCAGGTAGCTTAACTTACCACATG | 288 | TAAATGCATGACTGACATGTGCTATGCAGGAGTTACCTCATT | W | W | A | W | GYSNP0759 |
| CATGCATTTGCAGGGAAAACATACAGATTCAGAATATCA | | GATCGGGCCTGCATGAGGGACCAGGCAATCTGGGTGGT[A/T] | | | | | |
| AATGTGGGGTTGACAACATCCATCAAC_NODE_1_length_601_ | | GGGCCACCAGGGGGAGGACCGGAGACCCTGATTCTGGAGTT | | | | | |
| cov_127.241264 | | GCGGTAGTGGAGAATAGCAGTGGTCATGAGCACGCGACG | | | | | |
| RAD_kmer_0002670_1_TGCAGGTTTGGCTCATGTTGATGAA | 294 | GTTTCTTTGCATACTAGTTTTTTTAGAAAAAAGGATGGGGTTC | T | — | Y | Y | GYSNP0760 |
| AATAGCTTGGTTTAGTTTCTTTTTACTCATTCAAAGTCAAA | | TATGCATAGTCTTATGAAAGCATATGACAGTAGTAAG[C/T]TA | | | | | |
| AGTAAAGAAATTTAAAAAGTTTTTCA_NODE_1_length_361_cov_ | | TGAAAACTTTTTAAATTTCTTTACTTTTGACTTTGAATGAGTA | | | | | |
| 112.612190 | | AAAAGAAACTAAACCAAGCTATTTTCATCAACATG | | | | | |
| RAD_kmer_0002674_1_TGCAGGTTTTGTCTTGGTTCCCTGTG | 159 | ATAACTTTTAGTGTACATTTTAAATATTTATATAAATGGGTGA | T | Y | Y | Y | GYSNP0761 |
| GCGAAAGTTTGACCATCGGGATGCCATGGTGATGCAAATG | | ATTACATCAATATGTATCCAAGTATCCAATTATACAC[C/T]TG | | | | | |
| AGAAATCCCAGTGTCCATTTAAAGA_NODE_1_length_627_cov_ | | TTTGTTATTGATGTATTAAACTACCAAATGTACCTTTTGATGT | | | | | |
| 109.550240 | | ACCAAATTTCCAGTTCTTGCTATTGTATGTATTTG | | | | | |
| RAD_kmer_0002674_1_TGCAGGTTTTGTCTTGGTTCCCTGTG | 217 | ATCCAAGTATCCAATTATACACCTGTTTGTTATTGATGTATTA | A | R | R | R | GYSNP0762 |
| GCGAAAGTTTGACCATCGGGATGCCATGCTGATGCAAATG | | AACTACCAAATGTACCTTTTGATGTACCAAATTTCCA[G/A]TT | | | | | |
| AGAAATCCCAGTGTCCATTTAAAGA_NODE_1_length_627_cov_ | | CTTGCTATTGTATGTATTTGACCTTTTAGAACTTGTAAAACGG | | | | | |
| 109.550240 | | TGATGTGGCAACTTATATGGCTGCCGCGTCACCGG | | | | | |
| RAD_kmer_0002674_1_TGCAGGTTTTGTCTTGGTTCCCTGTG | 450 | TATAATTGAATACATTTCCATGTAGTTTGCCCTGTACATTCCC | G | R | G | R | GYSNP0763 |
| GCGAAAAGTTTGACCATCGGGATGCCATGCTGATGCAAATG | | GTTTTCCCAAAACAAATGGGAACTGGTTTGCCCTATC[G/A]GT | | | | | |
| AGAAATCCCAGTGTCCATTTAAAGA_NODE_1_length_627_cov_ | | TGTGATTTTTTCAAGCTTAGCGGTAATTGTCTCACTTACATT | | | | | |
| 109.550240 | | ACACAGTTAAGAGTTATGAAAACTTTTACGACAAT | | | | | |
| RAD_kmer_0002676_1_TGCAGGATATAAGCAAGAAAGAAT | 168 | TCAAACATAAAAAGTGATTATGTGATATTGAGTAATGGAAAT | T | W | W | T | GYSNP0764 |
| AGCGGGTATGGGTCTTAATGAAGAAGAACTCAAGGCGAA | | CAGATAATTAGCTGTAACAAAATGGGTTATTAGAGATA[T/A]T | | | | | |
| TAAAGTAAGAATCAATATACCCATGTGA_NODE_1_length_ | | GTTGGATGTGCCTTGGTTGTTTGAAGTTAACTATTAATTGAAA | | | | | |
| 634_cov_110.190849 | | TTACAATAAGTAGAATATCAAACATAGTTATTACCT | | | | | |
| RAD_kmer_0002676_1_TGCAGGATATAAGCAAGAAAGAAT | 308 | TATCAAACATAGTTATTACCTCATTATAGCCTTGCCACCTGGC | R | G | R | G | GYSNP0765 |
| AGCGGGTATGGGTCTTAATGAAGAAGAACTCAAGGCGAA | | TTAAGGACTCGACGCATCTCCTTGAATACTTCAATCG[G/A]TT | | | | | |
| TAAAGTAAGAATCAATATACCCATGTGA_NODE_1_length_ | | TTGTCAAATAGTCAACACTAACCTGCCGTGCAATACGGTATT | | | | | |
| 634_cov_110.190849 | | TAGTAATAGCCCGGTTCAAGAATATGTGAATAACTA | | | | | |
| RAD_kmer_0002676_1_TGCAGGATATAAGCAAGAAAGAAT | 567 | GACCTACAGCGGTTATAAATGTAACAATGATAAAATCAATTA | R | G | R | G | GYSNP0766 |
| AGCGGGTATGGGTCTTAATGAAGAAGAACTCAAGGGGAA | | ATGTAAAAAATCTTTCACATGGGTATATTTTTTTGAAC[G/A]G | | | | | |
| TAAAGTAAGAATCAATATACCCATGTGA_NODE_1_length_ | | CTCACATGGGTATATTGATTCTTACTTTATTCGCCTTGAGTTC | | | | | |
| 634_cov_110.190849 | | TTCTTCATTAAGACCCATACCCGCTATTCTTTCTTG | | | | | |
| RAD_kmer_0002688_1_TGCAGGCAGGATAATATGATAGTTG | 375 | AGTTGTAATTTGTAAACTATCCCTAACATACAATGATAAGTA | G | R | R | G | GYSNP0767 |
| ATTTTTATTAATTAGTGTGTATAAGTTAGCTGTGTGTTATC | | AACTATAGTACCTATAGATAAAAGGAGCAAGTAGACAA[G/A] | | | | | |
| TGATTTTAGTACTGCAAGCATAATT_NODE_3_length_524_cov_ | | AAAACAAGCACTAACCACTGTCTAGGAAATTCTGCTTAACC | | | | | |
| 38.881680 | | AAATCAAACCAATTACACTCACTAATTAGTAAAAAACC | | | | | |
| RAD_kmer_0002694_1_TGCAGGCTCTTTGAAGGTAAAACTT | 480 | AGTGCATGTGGTCTTAATTCACTGCACAGTCTCATAACCTCTT | R | R | G | R | GYSNP0768 |
| GTATAAAAAGATGGAAGTATAAACTTTATAAAATAAAAA | | TTCTAACCACTGCAGCATTATCTGTTGACAAGTAACC[G/A]TA | | | | | |
| CTAAATATTGCTATGATTTTTGTTGCA_NODE_1_length_617_ | | TCGAAGAAACGATATGTCTTCTTCCATCACAATTGTTGTGTAC | | | | | |
| cov_110.307945 | | ATTGATCTCATTAAACCTAACACGTCCTGCAACAA | | | | | |
| RAD_kmer_0002697_1_TGCAGGTACAACATATAATTAAAAT | 314 | GTACGCAAAAATATTTTTTACAATTAAAGATGTTAGAGTAAT | T | Y | C | Y | GYSNP0769 |
| CAAAATGTAGCATACTAGCATATATGTGTGAAATACAATA | | CACTTGGTCAAATATTTACAGAAAGAGGATTCATGTAA[C/T]G | | | | | |
| AAGTTGTATATCATGACATACACATT_NODE_1_length_494_ | | CCTGTGGTGAATCTGGGAATCTGCTTGTTTGTGAAACGTGCA | | | | | |
| cov_93.997978 | | CTTATGAGTACCACCCTAAGTGTTTATTACCACCTCT | | | | | |
| RAD_kmer_0002703_1_TGCAGGTGGTGGTGGTGGCGGTAGA | 205 | GATCTGGTTTCATATGTATAGACTTGCATGTTTGTGTATGCAT | A | M | M | M | GYSNP0770 |
| GATGAGCACATAAGAGTGTTTGGAGTCGTTGAACCACCAC | | AAATTTACAGAAAGGATAGCTTCATAACACATAGAGC[A/C]T | | | | | |
| CACCAAAGGTGTACATTGAGTGTTCT_NODE_1_length_636_ | | TCTGTGATGCTCTAATGGAAGAAAACTCAAGAATTGCATCAC | | | | | |
| cov_159.762573 | | GTCCACTAGTTCCCAACATGACCTTTCGGAATGACAT | | | | | |
| RAD_kmer_0002703_1_TGCAGGTGGTGGTGGTGGCGGTAGA | 544 | CCATCAAGCTCAAATTACAACAATGTTGGAATGTTACAACCG | R | R | R | R | GYSNP0771 |
| GATGAGCACATAAGAGTGTTTGGAGTCGTTGAACCACCAC | | GATATGATGAATTGGTTGGGTAGATACAATAGTTTACC[A/G]C | | | | | |
| CACCAAAGGTGTACATTGAGTGTTCT_NODE_1_length_636_ | | AAGGGTTATCATTAAAAGATGAAGAACACTCAATGTACACCT | | | | | |
| cov_159.762573 | | TTGGTGGTGGTGGTTCAACGACTCCAAACACTCTTAT | | | | | |
| RAD_kmer_0002704_1_TGCAGGGTTGGAACTTTTGCTGTGT | 185 | ACGGTCGTGGCATTAGTAGTGGTTTAACATGATAATGATGGA | A | C | C | C | GYSNP0772 |
| CATGGCTGTTGGGAACGTTCTTGATGGTGTCGGTTATCCC | | GGTTTAGCGGTGAACTAGAATGAACTCGCCACTTTCTT[C/A]T | | | | | |
| ACCAATCCTGAAAGGGCCGAGGAGTT_NODE_1_length_653_ | | TTTTGAACAGCAGTGAGATTTTACAACTGACCAAAGACGCAA | | | | | |
| cov_133.150070 | | GTAGCTAGACAAGTAGACAGTACAAAAAAGATCACCA | | | | | |
| RAD_kmer_0002708_1_TGCAGGCATATGCCACGAAGTTATA | 233 | ATGCTAAAGAAGCTGTTGAAATGTTTGACCAAATGACAACGA | A | G | G | G | GYSNP0773 |
| TCCAGCTACATCCTGCTTTTTTCTTAATTCCTTTACCACAC | | ACAAAGTCAAAGTCAAACCCGACTTGACCACATTTCTT[G/A]T | | | | | |
| ATGAGATTATGTACTCCAGCAGAAT_NODE_1_length_646_cov_ | | AGTAATTTCTGCTTGTAGTCATGTAGGATGGCTAGATAAGGG | | | | | |
| 117.075851 | | GATAGAATATTTTGAGTTGATGAAAAACGATAGTTCC | | | | | |
| RAD_kmer_0002708_1_TGCAGGCATATGCCACGAAGTTATA | 309 | TCTTGTAGTAATTTCTGCTTGTAGTCATGTAGGATGGCTAGAT | A | G | G | G | GYSNP0774 |
| TCCAGCTACATCCTGCTTTTTTCTTAATTCCTTTACCACAC | | AAGGGGATAGAATATTTTGAGTTGATGAAAAACGATA[G/A]T | | | | | |
| ATGAGATTATGTACTCCAGCAGAAT_NODE_1_length_646_cov_ | | TCCCTTGAACCATTGAAAGCCGAACATTATGCTTGTATCGTG | | | | | |
| 117.075851 | | GATCTTTATGCTAGAGCTGGCTATTTAAATGAAGCAG | | | | | |
| RAD_kmer_0002708_1_TGCAGGCATATGCCACGAAGTTATA | 410 | CCGAACATTATGCTTGTATCGTGGATCTTTATGCTAGAGCTGG | — | C | Y | C | GYSNP0775 |
| TCCAGCTACATCCTGCTTTTTTCTTAATTCCTTTACCACAC | | CTATTTAAATGAAGCAGAAGAATTTATTAAAAGCATG[T/C]CA | | | | | |
| ATGAGATTATGTACTCCAGCAGAAT_NODE_1_length_646_cov_ | | ATAGAAGGCGGACCCGAAGTTTATAGAGCACTGTTAAGTGGT | | | | | |
| 117.075851 | | TGTAGACTTCATGAAAATAAGGAAACTGGTGTCCGT | | | | | |
| RAD_kmer_0002709_1_TGCAGGAGATTCTTTACAGCTTAGC | 147 | AGACGTAAAGGACTGAGTAAGCTAGCTGCACATTCTTATTAT | T | A | T | W | GYSNP0776 |
| ATCTCAAATACTTCTAACGAATAATCGCGATCGATTGTAA | | AAATTATTAATAAATATATATTTAACTTGGCACATAGT[T/A]A | | | | | |
| TATAAGAATATATGCTTCTGCTGAAA_NODE_1_length_559_ | | AAAAAAAAAAACCATGTTTGAGTACTGTGCTTTGACTAAGAG | | | | | |
| cov_77.135956 | | GGTAACTTGTGCTTTGACTTTTGACACTGATCAATAC | | | | | |
| RAD_kmer_0002719_1_TGCAGGGAAGAAAAACTAGTGGAG | 134 | AAGCTTCCATGCCCTAGCTAAATTCAGTTGATTAATCATGTGA | C | Y | Y | T | GYSNP0777 |
| CGCGCAAAAGCACTTAAAGTAAACATTGGAACTGACCCT | | CAAATAGTTCAGTTTGTTTTTTTAAGCATAAGGGTAA[C/T]AT | | | | | |
| GATACAGACATTGGCCCTGTGATCAGTA_NODE_3_length_419_ | | GGTCATTTCACATGGATTTAACTTTTAACGTCTTGAGTGAAAA | | | | | |
| 19_cov_38.470165 | | GGACCAAACACACACGTGTTACTGTTTGGAAAACA | | | | | |
| RAD_kmer_0002726_1_TGCAGGTTAACCAAACTGAATATGG | 346 | AATAATATAGATAAAGATACCTAATAATATTATTATATATTA | W | A | A | — | GYSNP0778 |
| TCTACCGTTTTCTTGAATCTATACAATTATATATTTCAATA | | TTAACTTAATAATATTTTTGAAATTAAAAAATTGAAGG[A/T]G | | | | | |
| TAATACTCGCACCATATTGATTCTC_NODE_1_length_454_cov_ | | ATAATATTGATGACGTGACTTATTGTGGTGTGAGAATGGTAT | | | | | |
| 95.429512 | | GAGAATCAATATGCTGCGAGTATTATATTGAAATATA | | | | | |
| RAD_kmer_0002728_1_TGCAGGTCTACAATATTCTCATCTTC | 386 | TTTGAGGACAAACATTTTTTTTACGAATGGGAGAATAATAGA | G | A | R | R | GYSNP0779 |
| TACGAAAACGTTTGACCTCACACTTGGAAAAACATTTATG | | GCTCAGGGTGATCCGTTACCCATCGCCTCAATCCGACA[A/G]A | | | | | |
| AATTTACTTGAATTATAATCATACC_NODE_1_length_537_cov_ | | GAATTTACAAACTATCTGAATTAGATCAAGGAGTTTATCCGA | | | | | |
| 18.201118 | | ATCTTGGTTTGGAATTGTAGTTGCTCTATGAAGTTAT | | | | | |
| RAD_kmer_0002734_1_TGCAGGTGATTAGTGGGCTGCACCA | 115 | GGGAGATTGAGCTTTGAAACCAGTTCGTGAATGGTGATTGGT | G | K | G | K | GYSNP0780 |
| AAGCTATTGGCCATTGGGCTTCAAATCGTACTTAAACATA | | TTTCCATGATCATGAACGATGTCGGGTATTCTTAGTTC[G/T]A | | | | | |
| AAGGTGTAAAGAAATGGTTTGGGCCT_NODE_1_length_506_ | | GTGCACAACCAAGAGACATGGAGGTGGGATAGTTGAGGACA | | | | | |
| cov_70.616600 | | TGTCTGTATATATGACTTGAGCTTCAAAGACCACATTT | | | | | |
| RAD_kmer_0002749_1_TGCAGGTCTTTTATGTTTGTGGGCAT | 425 | GTTGTCGAGTTGATAGTAAATAAAGATAGGTGCGGTCATTTT | T | T | T | C | GYSNP0781 |
| CGGAGCGTGTTGTAGAAATCGTTGACCGTTATGACGATGA | | CGGAGGGACTTTCAGGGTTCGGACAGAAGTTTTGTTCG[T/C]A | | | | | |
| CTGTCTTCCCGATGCCTACAGCACT_NODE_1_length_520_cov_ | | TTGTTGCTCCGAATAAACAAATCTGGGTTAGTGCTGTAGGCA | | | | | |
| 150.194229 | | TCGGGAAGACAGTCATCGTCATAACGGTCAACGATTT | | | | | |
| RAD_kmer_0002757_1_TGCAGGAACGGTAAGCATTCACCTT | 162 | CCATATATCTATATACCCCTTCGATG GTCTCTCCCGTTAGA | G | R | R | R | GYSNP0782 |
| TTGTTGTCCTATTTTGGGTGATTAACTTAAGAACTCCATTA | | ATCAGTATAGAATGTCTTGTTTGTCTTTAAGCTAGTT[G/A]TG | | | | | |
| CATGTTGCAAGTTTTGTTACAGAAA_NODE_1_length_573_cov_ | | ATCTGAGTTGTTAATTCTTTCCCAACACCATCATCTATAGGTA | | | | | |
| 87.111694 | | TAGGTCCAACCTAGTACCAAATTGTAGAAATATGT | | | | | |
| RAD_kmer_0002763_1_TGCAGGGGCGTATTAACAATAAATA | 255 | TTGTGATTCGTGTCGGTGTCGGGATTTGTCTTAAAACTAAACC | — | G | G | K | GYSNP0783 |
| AAATAAATAAATTGTTTATATTGAAAAGATTATCTTGTAA | | ATGTCTCTTCACTTTTAGAAGATTAATAAGGGAATTT[G/T]TC | | | | | |
| GTATTCTAGAAGTTTAGGTTGTTAGT_NODE_1_length_503_ | | ATGAAAAAAAATGTTTAGAGATGACTTGGGGGTAAAAAGAG | | | | | |
| cov_96.986084 | | AGTTTTCTACTTGAGACCTATGGTGAATATAGAATTG | | | | | |
| RAD_kmer_0002765_1_TGCAGGTGATGTTGATGAGGAGGA | 92 | AACATTTATCAGCTGGACTCTGATACATACATAAGAATACAA | Y | C | Y | Y | GYSNP0784 |
| GAAGGCAATTGTCCTATACAAGGTAACAAGACACTAAGT | | CTATTATAACGCTCTTATGATAAGAACATATACAATGT[C/T]A | | | | | |
| AGAGTATTCTTATATTCTAGTGTGTAAT_NODE_1_length_451_ | | CGCAAGCTGCACCTGGCTAGATTGTATTAACAATTAAAATTA | | | | | |
| cov_67.339249 | | GTTTTCTTTGTACAAAACATACTCCTTTATTCCACAA | | | | | |
| RAD_kmer_0002766_1_TGCAGGGTACGGAAACGTGTACGG | 197 | CATCAGTTGATGCCGCTGGTGTTGATGAAGAACCTTGACCTT | A | — | A | G | GYSNP0785 |
| GGACGGGCCGAAGCGTTTCCAATCCGATTCCTTGACCGAT | | GTGTTTCTTGAGAACTAGGCATAATAATAATAATCGTG[A/G]T | | | | | |
| TCGAGAAGTCAACGACGTTTCTGCTGC_NODE_3_length_386_ | | AGAATATAGGATAGAATATGGCTGTGATTTTATTGATTGTTAT | | | | | |
| cov_54.321243 | | TGTTGAATCGTGGGTTTAGACTTTAGACTTTAGAGA | | | | | |
| RAD_kmer_0002766_1_TGCAGGGTACGGAAACGTGTACGG | 251 | AACTAGCCATAATAATAATAATCGTGATAGAATATAGGATAG | K | — | G | T | GYSNP0786 |
| GGACGGGCGGAAGCGTTTCCAATCCGATTCCTTGACCGAT | | AATATGGCTGTGATTTTATTGATTGTTATTGTTGAATC[G/T]TG | | | | | |
| TCGAGAAGTCAACGACGTTTCTGCTGC_NODE_length_386_ | | GGTTTAGACTTTAGACTTTAGAGAGGAAGGGCCGAAGGGTTT | | | | | |
| cov_54.321243 | | GAACTTTGAAGAGAAGAACATAAATCGTTCTTTGTT | | | | | |
| RAD_kmer_0002771_1_TGCAGGAGCAAAAGCATTTAGATGT | 231 | ACAAGGAATTTCAAACACCTCAATGATACATAATATTCCACT | C | C | Y | T | GYSNP0787 |
| TTGATAGGTGGATAAGCCAAGCTAAATACTCAGTGAACA | | AAAATTTTGTTCACTAATGATAAAACTTAAGTGCACAT[T/C]C | | | | | |
| CCATAAGTCATAGACAGCTTTAGGCAT_NODE_1_length_551_ | | CTTAAATTTAATTGCAAAAAAAATAACAAATTTGTCGAGAA | | | | | |
| cov_93.558983 | | AACCCCTTTAAAAATTCTTATGCGTGTTCTTACCCAT | | | | | |
| RAD_kmer_0002771_1_TGCAGGAGCAAAAGCATTTAGATGT | 319 | ATTTAATTCCAAAAAAAATAACAAATTTGTCGAGAAAACCCC | C | C | A | A | GYSNP0788 |
| TTGATAGGTGGATAAGCCAAGCTAAATACTCAGTGAACA | | TTTAAAAATTCTTATGCGTGTTCTTACCCATTATGCAT[A/C]TT | | | | | |
| CCATAAGTCATAGACAGCTTTAGGCAT_NODE_1_length_551_ | | ATGCGTAATGAAGTTTAAGAGCTTCAAGATAGTTGATGGTCT | | | | | |
| cov_93.558983 | | TATACAGTTGCTTAAATACATTATTATTAACCAATA | | | | | |
| RAD_kmer_0002772_1_TGCAGGGAATTTGTAAAATCTGTTA | 521 | GTAATTATGCTTGGAAGAAAAACATTAATAAAGTGGAAAATA | T | Y | T | Y | GYSNP0789 |
| TTCAAGGTGTTCTTCCAGGAATTGCTTTGAAAATTTTCCTC | | TAATATCTTGTTGCAGATCTCCTCTCTAAAGCAGATAT[T/C]G | | | | | |
| ATCATTCTACCTTCAATCTTAATGA_NODE_1_length_614_cov_ | | AGGTAAATCCTTCAAACTTAGACATCATCATTAAGATTGAAG | | | | | |
| 133.076553 | | GTAGAATGATGAGGAAAATTTTCAAAGCAATTCCTGG | | | | | |
| RAD_kmer_0002778_1_TGCAGGCCCGAAACTGTGAATTGCT | 432 | ACCCCATAGAGACGGGGAGGACCAGAAACTTTTAAAACTCTT | C | Y | Y | Y | GYSNP0790 |
| CGGCTAGAACAGGATTGGACATGCTGGAAAAACATTACG | | TCTAGAAAGTCAGATGGTGGGACCAAGAATAAGGTGGT[C/T] | | | | | |
| CAGATGCTATTGGTTTTGATATCGTTT_NODE_1_length_597_ | | CCGTCGCCAAATTTTACAACACCTGCTCGGTTTCGATCACCCA | | | | | |
| cov_110716919 | | TGTATTGTAGAAATTCGGTATATGAACCGAAATCCTC | | | | | |
| RAD_kmer_0002778_1_TGCAGGCCCGAAACTGTGAATTGCT | 522 | AATTTTACAACACCTGCTCGGTTTCGATCACCCATGTATTGTA | A | R | R | R | GYSNP0791 |
| CGGCTAGAACAGGATTGGACATGCTGGAAAAACATTACG | | GAAATTCGGTATATGAACCGAAATCCTCTTCACTATC[A/G]GG | | | | | |
| CAGATGCTATTGGTTTTGATATCGTTT_NODE_1_length_597_ | | TAAAAAGAAAACGATATCAAAACCAATAGCATCTGCGTAAT | | | | | |
| cov_110.716919 | | GTTTTTCCAGCATGTCCAATCCTGTTCTAGCCGAGCA | | | | | |
| RAD_kmer_0002783_1_TGCAGGTTAATGTGCCGCCAACCCA | 179 | GTAATTGAACGACTTGCTTGTCCATGCTTTATAAACTTCCACG | C | Y | Y | C | GYSNP0792 |
| TCAATTTTATACATATTTTTAACTTTCCTTTATATCATCTAC | | GCTATTTAACGAAATTACACGGTTTATGGACTATTTG[C/T]CG | | | | | |
| AAAATATAGAGATGATCCATTATA_NODE_2_length_358_cov_ | | AAAAGTAAATTATCCAACAGCCGAAACCCCTATGTTTTAGGG | | | | | |
| 19.871508 | | CGTTTGTTGTTATCAATTACACATGTGTAAAAATTG | | | | | |
| RAD_kmer_0002787_1_TGCAGGTAATTATTATTCTTATGTCC | 359 | GATTGTTCTTCTAGGTTTTGTTTATCGGATTTTTGAACTTGTGA | M | C | M | M | GYSNP0793 |
| ATTATATTTGGAATATTAAGATTTGAGATTATAGTTTGATT | | ATTTTGATAACTGATCCATTTAAAGTTTGGGATGGT[C/A]AGG | | | | | |
| CCGACTTTTTAACATTATCATATC_NODE_2_length_445_cov_ | | TTCGGGTAATTCGGATTGGGGTTAGTTCAGGTCGGATAGTTC | | | | | |
| 48.355057 | | GGTTTTCGGTTTAGATGTAAAATAAAATAAAATTG | | | | | |
| RAD_kmer_0002792_1_TGCAGGAGAAAAAGATAATCTTGTT | 214 | ATACATTACTTGTTGGCAATATAGAAAATATGTACATGTGCA | T | Y | T | Y | GYSNP0794 |
| CAAGGGCAAGGAGAAGAGATAAGAGAGAAAAATGCAGG | | TAGTGTAATATTTGCATTTTAAATAATTTTTTTGTGGG[T/C]GA | | | | | |
| TAGATATTAACCTTGCATAATCTAAGAT_NODE_1_length_331_ | | TTACAGGTTACGAGGCTGGTAAGAAAAGGTGCAAATAAGAT | | | | | |
| cov_69.861031 | | AACTTTGAGCATCGGTGATGGTGCAAATGATGTTGGG | | | | | |
| RAD_kmer_0002792_1_TGCAGGAGAAAAAGATAATCTTGTT | 270 | CATTTTAAATAATTTTTTTGTGGGTGATTACAGGTTACGAGGC | Y | T | Y | T | GYSNP0795 |
| CAAGGGCAAGGAGAAGAGATAAGAGAGAAAAATGCAGG | | TGGTAAGAAAAGGTGCAAATAAGATAACTTTGAGCAT[C/T]G | | | | | |
| TAGATATTAACCTTGCATAATCTAAGAT_NODE_1_length_331_ | | GTGATGGTGCAAATGATGTTGGGATGATTCAAGCAGCTCATG | | | | | |
| cov_69.861031 | | TTGGTGTTGGAATAAGTGGTTTAGAAGGAATGCAGGC | | | | | |
| RAD_kmer_0002792_1_TGCAGGAGATTTACTATTTTCTTCA | 320 | GGCCCTGCTACTTGTCATCATATAGACAGTGGGCACACGCGT | C | — | G | G | GYSNP0796 |
| GCTGATGCCTTTTTAAAAAATATATAATATATTATTTGCCA | | CGCTTCTAGTCCGGATTCTGACTTAGAGGCGTCCAAAA[G/C]T | | | | | |
| TGCTGATATACAAGGAGCCCATGTT_NODE_1_length_599_cov_ | | CAGCTAGAAGAACGACCTGGATCACTTTTACACTTAATGGGT | | | | | |
| 69.490822 | | TGACTGGTCATCTAGTGGAACCTTCATGTCAACAGTT | | | | | |
| RAD_kmer_0002797_1_TGCAGGCTGGTTTGTTCAAGGGTTT | 363 | CCATTCTATTAAAAAAATATTCTCAAATGGATTTTTATATAAT | G | A | G | G | GYSNP0797 |
| GAAGAACTCGCCGTTTACAGACATTTGTCTAGCTAATATA | | ACTTCAGTATCACAAACTGGTTAATTTTGGTGATTAC[G/A]AC | | | | | |
| CATCTAAGCGGGTCAACTGGTTCGAG_NODE_1_length_583_ | | AATGATACAGAATTAAACTTGAAATATTACACATACATTCAG | | | | | |
| cov_87.132072 | | AAAGGAATAGTGCATACACTGGTTTGGCTTCGGCTG | | | | | |
| RAD_kmer_0002801_1_TGCAGGAAATGGGTCGATCAAAGG | 280 | AGCCTAAAAAAGGGGGGAGGGGGGCGCGAAGCTCAATATAT | — | G | R | G | GYSNP0798 |
| TATCATAGGAGTTGTTTTAACGGATGAACCGATTCAAAAA | | ACAAAATTTTCAGACGAAAACGGGGAAATTTACACTACT[A/G] | | | | | |
| GTATGGTTTGTTGCTCAAGCCATTAGA_NODE_1_length_546_ | | AGCCGAAAAACAGGGGGGCCGGGGCACCCCCTCCCCCATCT | | | | | |
| cov_57.593407 | | AAAGCTTCGCCAATGCACATGAATAAGTAAAATGTGTAA | | | | | |
| RAD_kmer_0002802_1_TGCAGGTGTTACGCATGCAAGAAAA | 298 | GAAGACCAGTTTTCACCAAATGCAAGCAGGACTTTTCCCTTA | A | G | A | A | GYSNP0799 |
| CCAACATCAAGTGTTGAGGCTGACATAGTAGGTGGTGGAT | | TAACCGTATACTGGACCACTACAAAATGTATGTAAAAA[A/G] | | | | | |
| CAATCACCTGCTCTCATGCTCAACCA_NODE_1_length_637_ | | TATATTTAAGATTTGAGATACCATAAAACTATAAATTCACCA | | | | | |
| cov_164.094193 | | CATGCCTAAAATCTTCCAATTAAAGTTAAAGATACCTT | | | | | |
| RAD_kmer_0002802_1_TGCAGGTGTTACGCATGCAAGAAAA | 507 | TTAACTCTGTCACCTGCCAAATGATGGTTTTCATTACACAAAT | G | A | G | R | GYSNP0800 |
| CCAACATCAAGTGTTGAGGCTGACATAGTAGGTGGTGGAT | | GAAGATATGAGTAACAAACACCATATAGAATGCAAGT[G/A]T | | | | | |
| CAATCACCTGCTCTCATGCTCAACCA_NODE_1_length_637_ | | TATATAGCTATATACCTTCTTTGAAAGTATAACGTTTTGATGA | | | | | |
| cov_164.094193 | | TGCAGTGGACGCTTCCTGTTTTGGTTGAGCATGAGA | | | | | |
| RAD_kmer_0002806_1_TGCAGGCCACATCTGGAAACAAATC | 427 | CAGTAGGATAATAAGATGCAGGCACAAGTCTTCAGGCCGTCA | T | A | T | — | GYSNP0801 |
| CCTGTTAGTTTATAATTACTGAGTGTTGAACAGATATATA | | TTTCTTCCTCCTGCCTCCAATTCCATCACAACCCTCAC[T/A]AC | | | | | |
| TATACATATATATATATGGTGAATAC_NODE_1_length_536_ | | ATCTTCAAACCTTTCTTTTCCTAATAAATTCCCATGTCAGTAG | | | | | |
| cov_78.117538 | | TATTCACCATATATATATATGTATATATATATCTG | | | | | |
| RAD_kmer_0002809_1_TGCAGGCTGCAATTACATATATTGG | 85 | GTCGATACACTTCTGTTTTATGTACCTGAAAATATGAAGGCA | A | A | W | W | GYSNP0802 |
| AAGAAATGAATGTGTACATGATTTCAGTCACCATGATTCT | | CGTGTGAATCAAATGAAGATTAAAATCAAAACGAAAAC[A/T] | | | | | |
| CTTTTCACTGATATTTTCAAATTTAT_NODE_1_length_611_cov_ | | AAAATAGTGGAAATAAAAAGAACCTTTGTAAGAGATCTTGGT | | | | | |
| 99.869064 | | AGAGATAAGGCAACTCCAACAACTTAAACGCGATTACA | | | | | |
| RAD_kmer_0002810_1_TGCAGGCGGCGCCGCGGGGGACCA | 218 | TTCAGTCGTCTCAGCAACAATTTTTATTCTGATCGAGCCTTGC | T | C | T | — | GYSNP0803 |
| TAGTCTAATTAGCGGTGGCGGCGCGGCGGCAAGGAGCGC | | ATTATTGGCGGATAGTTTTTCTTTCGGTTGCCGTTTT[T/C]CCT | | | | | |
| TTGATGGAGAAGCGGAATCAACAAGACG_NODE_2_length_ | | TCAAAGTCTCACAACAATCTGTTCTTCCTCGTGAACCATTAAT | | | | | |
| 534_cov_52.234081 | | ATTGTTTGGAATATAGTGTCCGACAAAATCATTA | | | | | |
| RAD_kmer_0002811_1_TGCAGGTTTAAATGAACTTTTTTTAT | 154 | CATGTAAATGCTATATGTTGCTACAAGGATCCATAGGCACCA | T | T | C | T | GYSNP0804 |
| GATTATTATAACATATTTCAAGAATCAATAGTGCAATTAT | | GAGCGAAGCAAAGATGCTTCTATCCGGTCGTTCTTATT[C/T]G | | | | | |
| AAGATATTATTCATTTTTCCTTTTT_NODE_1_length_641_cov_ | | GCTTATAAGCACATGCAAGCCCGGTTAGACTCGCAACATAAT | | | | | |
| 119.723869 | | AGGGGGGAAGATGTTATCGTGAGTGACCAGACTCTGA | | | | | |
| RAD_kmer_0002811_1_TGCAGGTTTAAATGAACTTTTTTTAT | 449 | TGTTTTTGGTGTATGATCAAACAATCAAACGTTGTATACTTCA | T | C | C | T | GYSNP0805 |
| GATTATTATAACATATTTCAAGAATCAATAGTGCAATTAT | | GTTATCGTTTTGTTTATTGATCATTCCAAATGGCAAG[C/T]TTT | | | | | |
| AAGATATTATTCATTTTTCCTTTTT_NODE_1_length_641_cov_ | | CTCCATAGCCATGACGGTAAATATTTGTGGCGCTTTTGCAGG | | | | | |
| 119.723869 | | AACCAGAGGACGTTTCGTCCAAAGAAGAGTGCACC | | | | | |
| RAD_kmer_0002813_1_TGCAGGTGTTCCTTTGAAATCAATT | 586 | TAATAATCCTCCTAATGGTTAATGGACACTTAGTTAGCTAAAT | A | A | T | A | GYSNP0806 |
| TGGTTTATGGTTGGTCCACTTGGTTCCTGGTCTTATATATG | | AATTTATTCAAAAAAATTTTAAAAATACAAAATTACT[T/A]TA | | | | | |
| CTCCTTAAAAAATTTATTGCCGAAG_NODE_1_length_654_cov_ | | ACTTCGGCAATAAATTTTTTAAGGAGCATATATAAGACCAGG | | | | | |
| 79.388382 | | AACCAAGTGGACCAACCATAAACCAAATTGATTTCA | | | | | |
| RAD_kmer_0002814_1_TGCAGGTAACAATTACAGGGGTAA | 361 | TAAGATAAGTTAGAACCCAAACAGGCTAAATCGACCCATTCA | C | G | G | — | GYSNP0807 |
| GGGACCATCTGCATCCACCAGTTCGATCACTTCTAGAAGC | | TTAAGTAAATTGGTTGATATTGTCTTCTCTATTGTAAA[G/C]TA | | | | | |
| ACAACCATGAAGAAACTATCATCTTCA_NODE_1_length_599_ | | AGAATTAAATATGGTAGATCCAGAAGCTTAAGTTGACCAACC | | | | | |
| cov_99.215363 | | CGGGGTTGAAAATGACTTCCTGAAAGTATTTCCTCT | | | | | |
| RAD_kmer_0002831_1_TGCAGGCTGTGATATTTGAAGCTTT | 473 | GAACTGGATTCAAAAACCGGATAACGTCATAAATAACTTAGA | T | T | T | C | GYSNP0808 |
| GTCTATCCAGCATCCTCCATTGTTTTCCATACACTCATTTG | | AACCAAATATATGAATATATAACCAATTAGCAATACTT[T/C]A | | | | | |
| TTTCAATTCCTGAAAGCAGCATATA_NODE_1_length_609_cov_ | | TTTTCTGTGCGGATTTACAAAAGTATTAAACTATGAAGCTTTC | | | | | |
| 103.477829 | | GAATACTGAAGTGAAGCACGTGATGCATATATGCTG | | | | | |
| RAD_kmer_0002833_1_TGCAGGATGCGGTTAACCTTTTTGA | 482 | TCAATAAAAAGGTACCCTAGCGCCTAAATTTCATCTTCTTGGC | A | G | G | G | GYSNP0809 |
| TGAAATGATCGATAGAGGTATTCAACCGAATACTGTGACA | | CTTAATAGTTTTTAGTGCTATCATTGTTCGCGAGTTC[G/A]GCT | | | | | |
| TACACTGCTCTTGTATGTGGCTATTG_NODE_1_length_612_ | | CAACTCCCTTCGATATCATCTCATCAACAAGTGTTATTGCACG | | | | | |
| cov_122.586601 | | CTGCCTATATCCCATAGAGCAATAGCCACATACA | | | | | |
| RAD_kmer_0002844_1_TGCAGGAATGTTTATACAACAAGGG | 286 | ACCCGTTTTGACCTACCCGCTCTTTTTAACACTGCTATTACAA | G | R | G | 5 | GYSNP0810 |
| CTTACCTCATTTGTATGCTCTCTTTTTTTATATGATTATTTT | | ACAATGTAATAACCTCACCTGAAAAACACTAGAAGTC[G/A]A | | | | | |
| GTAATTCTACATAAATGAATGTTT_NODE_1_length_632_cov_ | | CGAAGACTCTCCATGCTTAGAAAATCCAAACCCACAGCCTTT | | | | | |
| 168.085449 | | GCATAACCTTATGAGTATATTTGTTACAGGAATCCAT | | | | | |
| RAD_kmer_0002847_1_TGCAGGACTATGGTCCGCCGCCACG | 502 | GGAAACCAGAAGCTCATACTGAAAAAACAATAATATATAAA | A | G | A | G | GYSNP0811 |
| CTGTTAATTAGTTAGTTATTTTCTTCACCGTAGACGTCG | | TAATAAATAATAATAGGATAAACGTACTTCGCTCGATCA[A/G] | | | | | |
| TGTAGCCGCATTGCATGCCTCTCGC_NODE_1_length_647_cov_ | | AAATCCAAACGTAAACCAACTAATCCATATTTTGCTTGATTTT | | | | | |
| 75.074188 | | GCCATCCATAGTATTCAATGACACATCCCGTAATCCT | | | | | |
| RAD_kmer_0002848_1_TGCAGGTTGAGCAAAACAATGCAA | 356 | TCATATACATTTATAGTTATTTTCATCTTGAGCTTGGCTCATG | C | A | M | M | GYSNP0812 |
| AAATTAATCACCATTTTCCTTCCATACTAGGGGTGTAACG | | TGTAGTTTACTAACCTCGATATATGAAGCTCGGGCTC[A/C]AG | | | | | |
| AGCCGGACCACTCGTGAGCCACTCGAT_NODE_1_length_499_ | | CTCGTTTATTGAATGAGCCCCGTATAAGCTTGAGCTCATTTAA | | | | | |
| cov_180.006012 | | CCTTGGCTCGATTCGAACTTTTAACGAACTGATAT | | | | | |
| RAD_kmer_0002849_1_TGCAGGAAACGTTAACAAGATTCAC | 391 | AGGGGTCGTTCGGGACTAAATCGCATATATACTCATCTATCA | C | C | T | C | GYSNP0313 |
| TTTGTGCAACCAACCTATTAAGCAAGTAAATATACAAAAG | | AAACAAATTAAAAATTCATGAAATGCGGCCGCAACCCA[T/C] | | | | | |
| CAGCTATAATCAACTGACAAGTCTAG_NODE_1_length_505_ | | CCGCGCCATCTAGGTACGCCACTGCAGTTAACTGTGAAAACA | | | | | |
| cov_97.380196 | | TATGGTCCTAGACTTGTCAGTTGATTATAGCTGCTTTT | | | | | |
| RAD_kmer_0002850_1_TGCAGGGTTTGATCTTGATAAGGTA | 227 | CTAAGTTCACGGGTATAGGTACCCATTTATGGTCTTATATGGT | A | — | R | A | GYSNP0814 |
| CACCCGAAATTTCACGTACTGATTTGCTTAGGTGGTATGA | | TGAGTATTACCTCGGGGATGCCCATTACCCGAAACCC[G/A]AG | | | | | |
| TGAATGGGTTGGGTAACATGTCAAAA_NODE_1_length_405_ | | CTTAAACTCACGTAAAAAAAGGGACTTGAAATATCAGATACT | | | | | |
| cov_38.854321 | | CAACTACATTTCTAATAATTTATAATATTATTAATT | | | | | |
| RAD_kmer_0002854_1_TGCAGGAGGTGTTTTACAGCTTAGT | 179 | CTAAGCTGGTAACTTGTGTTTTGACACTGTTTATCATATAAAT | A | A | T | T | GYSNP0815 |
| ATCTCAACTTATAATGAATAATCAACGAAAGCGTCATTAA | | GCGAGTTGAAATCAATATAATATGTTTTAGTATTTAG[T/A]TA | | | | | |
| ATATATGTGCTTCTGTTGGAATTTGT_NODE_1_length_496_cov_ | | AAAGATTTTGCTTCTCGTTACCTGGTTACTTAGGGTGTCATAT | | | | | |
| 118.100807 | | AATCAGTTTCATATCAGCTGCAGGCCTGCAGCAGA | | | | | |
| RAD_kmer_0002855_1_TGCAGGCATGAAAATGATCTACAGC | 225 | TGGGATTTCAGGTAAAGCGGGGGACACCTCAGGGTTCCCGCA | M | M | A | M | GYSNP0816 |
| ATCAGCAGAAACTTGACACTTGCCACAAGGTTGGTCCATC | | GGGCACCACCCGAGTCTCATGTTAGGACCCATGCAAAG[A/C] | | | | | |
| GTTGATGTTTCTGTTTTCATGATTCG_NODE_1_length_596_cov_ | | AAACTCATTCTTAGCTGCTATCTGTCCCGCAGCTGCCAGCATT | | | | | |
| 123.526848 | | GTTGCCTTTAACTCTTCAAGGCGAATCTCCCACAACC | | | | | |
| RAD_kmer_0002858_1_TGCAGGGCTGTTGCATATATTCCTTT | 85 | GCAACGAAAACCGTCATAAAACTGCACATAAAACTTACTGTT | R | A | R | A | GYSNP0817 |
| AACAATTCTTGCAGTTCCTGCATCAGTACTTACTGTAAGA | | TTGCCAAGAAGGAATGCTGCAGTTGCACCTATCACCGC[A/G]C | | | | | |
| TCTCAACGCCACACACATGCATTTA_NODE_1_length_638_cov_ | | CAATAGAGTCAGCAAGAAAACCCATAGGCAAACCAAATAGA | | | | | |
| 85.957680 | | TAACCACCACCCAGCTGGAAGAAATACCGGTAAATACA | | | | | |
| RAD_kmer_0002858_1_TGCAGGGCTGTTGCATATATTCCTTT | 152 | CACCTATCACCGCACCAATAGAGTCAGCAAGAAAACCCATAG | C | T | Y | T | GYSNP0818 |
| AACAATTCTTGCAGTTCCTGCATCAGTACTTACTGTAAGA | | GCAAACCAAATAGATAACCACCACCCAGCTGGAAGAAA[T/C] | | | | | |
| TCTCAACGCCACACACATGCATTTA_NODE_1_length_638_cov_ | | ACCGGTAAATACATACATATATACATAAATATATATACACAC | | | | | |
| 85.957680 | | ACACACACACAAACATAACAAAATAACTATCCAATGGT | | | | | |
| RAD_kmer_0002859_1_TGCAGGGCCCGCATCATCCCTCCCC | 161 | AACGACTCGGAGTGTCTCGTGCTTTTTAAATCCAAGATCAAT | T | T | C | — | GYSNP0819 |
| CCGTTCAGAGTCTTCATTCATCGGACACCATCCGGCCTTA | | ATATTAAGCTTTAAACTGATTCTCTCTGTATATTCTTA[C/T]AC | | | | | |
| CATAACTTGATAAAGCTGTCTTTTGC_NODE_1_length_550_ | | TTTGAATCAACACATAACACTCTCAATGTCAAGCTTAAATCTT | | | | | |
| cov_82.063637 | | TCTTGAGTCAGGCTCGAGATTGTATCATGATGGCT | | | | | |
| RAD_kmer_0002859_1_TGCAGGGCCCGCATCATCCCTCCCC | 243 | CTTTGAATCAACACATAACACTCTCAATGTCAAGCTTAAATCT | G | C | G | — | GYSNP0820 |
| CCGTTCAGAGTCTTCATTCATCGGACACCATCCGGCCTTA | | TTCTTGAGTCAGGCTCGAGATTGTATCATGATGGCTA[G/C]TG | | | | | |
| CATAACTTGATAAAGCTGTCTTTTGC_NODE_1_length_550_ | | GACTCCATCTAGCTATTTTTGAGCTACGGTTAAGGAGGTCGAG | | | | | |
| cov_82.063637 | | CCAACACATGAAATCGGGTCATTTAAGTTGTGCCCG | | | | | |
| RAD_kmer_0002859_1_TGCAGGGCCCGCATCATCCCTCCCC | 446 | TCTAGGGTTACAGCGTGCTTAATTCAGGATACGTTTTGAAATT | T | T | C | — | GYSNP0821 |
| CCGTTCAGAGTCTTCATTCATCGGACACCATCCGGCCTTA | | ATTTGTAGCTGGTTTATTTGAAGCCAGAACGGGCCAA[C/T]TA | | | | | |
| CATAACTTGATAAAGCTGTCTTTTGC_NODE_1_length_550_ | | ATTGTACATACAGTCGGTATGTTTTGTAACTAGGGCCGCAAA | | | | | |
| cov_82.063637 | | AGACAGCTTTATCAAGTTATGTAAGGCCGGATGGTG | | | | | |
| RAD_kmer_0002861_1_TGCAGGTATGAAATATTTCTACATC | 369 | CTTGATTCTTATCAAAGCTCAGTATACCAAAAGAATCATAAT | R | A | R | R | GYSNP0822 |
| CCCTCTTTGTGAAATACGGAGTACCTTTATTCATACCATGT | | CGAAGAAAGATCAAACTCACAAAAAGTCCTGAACAAGT[G/A] | | | | | |
| TTGCTTCTCGTACACATGATCGTAA_NODE_1_length_466_cov_ | | GTATACTTTATCCCATGAGATCTTAAAAGGAGTTACGATCAT | | | | | |
| 127.952789 | | GTGTACGAGAAGCAAACATGGTATGAATAAAGGTACTC | | | | | |
| RAD_kmer_0002865_1_TGCAGGTTGGAACATTGTATCAACG | 187 | AGTCTGGTAAGTGGTAACTAAGTAATGAAACCCAATAAAAG | A | — | W | A | GYSNP0823 |
| TCAAAGTTGCATTTTATGTACCAAAAGTCGTATTGTCACC | | GTAGCCTACGCAAATAAAGGTTGTACAGAAGGGCAAAGA[A/T] | | | | | |
| ACTTTCATACCCTAACACAATAACTT_NODE_1_length_460_ | | GTTCATAAACATTGTCGCAAAAATATTATATATCTTTTACAT | | | | | |
| cov_43.65865 | | TTTAGATATTCAAACTGAATTTCTTTGGTGTTTACCGT | | | | | |
| RAD_kmer_0002877_1_TGCAGGTTTAGAATGATTAAAAACA | 373 | TGTTTGCCTTCTGAAATGGCAGTCTGATGATGTTAATCAAAAT | W | A | T | A | GYSNP0824 |
| ATGAAAATGATATTATTTTGATGATTCAAGAAACCTTTTT | | AATCCCATTTGTTGTTCATATTTAAACTATTATAACC[T/A]AAC | | | | | |
| CCTATGCTTCCTTTTCTTGTTTCTTC_NODE_1_length_504_cov_ | | CTGCTTATATCAAACTACATGAATTTCATGTTGCAGAGATTGA | | | | | |
| 52.277779 | | GGCGCTTAGCTCAAAATAGGGAAGAAACAAGAAA | | | | | |
| RAD_kmer_0002881_1_TGCAGGCTTTTAGGTAACTTTTTCA | 95 | GCAACATGACATTCTGGTGATGTTTAATTAGAAAGTTTGGCT | T | C | T | C | GYSNP0825 |
| ATAGCTGGGATGTTCGTTCAAGTGCATAAGAATTTGAGTA | | GAGACATTTAAACAAACATCTGGTATACATTAAGAAAC[T/C]C | | | | | |
| GGGTTTGGTCAAGAGATAAAGAAGCA_NODE_1_length_326_ | | ACAAGCGAAAACTGAATTTCAAAAGTCATTTTAAGACTATTG | | | | | |
| cov_46.248466 | | ATTCATTTTTGACATATCACAATAAAATATAAAAAAT | | | | | |
| RAD_kmer_0002881_1_TGCAGGCTTTTAGGTAACTTTTTCA | 237 | ACAATAAAATATAAAAAATCCGGTAAAAACTGTTACTATGAA | A | — | A | G | GYSNP0826 |
| ATAGCTGGGATGTTCGTTGAAGTGCATAAGAATTTGAGTA | | GAGTAATAGCATTCCAAATATCCAATTTGGGTATATCA[A/G]T | | | | | |
| GGGTTTGGTCAAGAGATAAAGAAGCA_NODE_1_length_326_ | | TCCCATTATTCCTTTTTAGTATTTGCTTCTTTATCTCTTGACCA | | | | | |
| cov_46.248466 | | AACCCTACTCAAATTCTTATGCACTTGAACGAACA | | | | | |
| RAD_kmer_0002890_1_TGCAGGATGGTACGGAAGTTGAATA | 227 | ACATATGGCGAAAATTTTTAAAAATTTGCAAAAACATATAAT | T | A | A | — | GYSNP0827 |
| TTGGGCCGCAAGGGGAATATGTCATAGAATATTAACCAA | | ATTGTGAAAAAAAATAGAAACTATGCAATATTTTTTTT[A/T]A | | | | | |
| GTTTTAAAAGTAATAGGTCACTAAAAA_NODE_1_length_495_ | | AAAAATGTCAAAGTTCTTATAAAATTGCGAAAAATAGTTAGG | | | | | |
| cov_86.795959 | | TGATAGTTTATTTTTAATGGTAGAAAGTAATAATTGC | | | | | |
| RAD_kmer_0002894_1_TGCAGGTCCACGCCCACCTCCTCCA | 343 | ACCAAATAACGTTTCTATCATTTCTTCACTAAACCTGTAACAA | C | C | Y | Y | GYSNP0828 |
| CCAGGTGGTGCACTGCCGCCACGACCACCAGGTTCCAGCC | | ATTAATCATGTTATGGTATCTTACCATATAATGAATA[T/C]AA | | | | | |
| TAAGACCGCCACGCCCGTCAGAGGGA_NODE_1_length_568_ | | GACAAAGAAGCTAAACAAATGAGAACTTACTGAAATGACCC | | | | | |
| cov_159.220078 | | TGATTTTATCTGATGCCAAACCATCGACTGATCAGGG | | | | | |
| RAD_kmer_0002894_1_TGCAGGTCCACCCACCTCCTCCA | 480 | TGCCAAACCATCGACTGATCAGGGTTAGCCATAACCTTATCC | G | G | R | R | GYSNP0829 |
| CCAGGTGGTGCACTGCCGCCACGACCACCAGGTTCCAGCC | | CAAAAGAACGGCTTTAGCTTAGCTTTAGAAGCATCGGC[A/G]T | | | | | |
| TAAGACCGCCACGCCCGTCAGAGGGA_NODE_1_length_568_ | | CATCACCACTTGAATGACTAGATCCCTCTGACGGGCGTGGCG | | | | | |
| cov_159.220078 | | GTCTTAGGCTGGAACCTGGTGGTCGTGGCGGCAGTGC | | | | | |
| RAD_kmer_0002898_1_TGCAGGAACACATTTCACTCATCAA | 214 | ATGATTACCAAAACTGTATCGTTTAATTAAAATGATAATTCCT | T | A | A | A | GYSNP0830 |
| ATACATTATTATTATTATTATTATTATTAAAATGAATATCA | | TTAATATAAAATGATTTAGGACATTTTAAGCTTTTGA[A/T]TA | | | | | |
| AAATAATGAATTAATAAAAATCCTA_NODE_1_length_637_cov_ | | CACATTAAGCGACTTTTGACCCGTTTCATTGTTAGCTAATATT | | | | | |
| 86.781792 | | AGACATTTGACCCTTATCAAAATAATACAACCCGA | | | | | |
| RAD_kmer_0002900_1_TGCAGGTCTTTAACATATTCATTAG | 526 | AAACTGAGTGTCATTTGAGATGACTTGTAATTGTGTAAATCA | A | G | G | G | GYSNP0831 |
| GATCATTGCGCAACCTATTTTGACCCGAGCACGTTTCATC | | TGTTTTCTGGTAACTGGACTTCTTTTATGTGGATGAAA[G/A]A | | | | | |
| CCTCCATTTAAAAGGACCAAACTTGT_NODE_1_length_616_ | | GACTTGACTTGTTCATATGCACAGACAAGTTTGGTCCTTTTAA | | | | | |
| cov_97.777596 | | ATGGAGGGATGAAACGTGCTCGGGTCAAAATAGGTT | | | | | |
| RAD_kmer_0002905_1_TGCAGGTAGCCCTTCATGGGTTCGA | 131 | GATTTTCATTCTTTGATTCCACACAGATGTGATACTTGTTTA | C | T | T | T | GYSNP0832 |
| ACGCACGCGGTAACACCGCTGCCACCCCCTTGCGGGTAGG | | TAAATCTCTTAGCTTCACTGCTATCTTGATTTATGAT[T/C]CCT | | | | | |
| CTGGCAGGTACCCGTAGTAGGTTCCT_NODE_1_length_562_ | | TACTCTAAATTGGAGATGTTTCTGAGTGATTTTATTATGTTGC | | | | | |
| cov_78.507118 | | TTAGAACCTCCAAATTATGCATGTCTGGCTTAAC | | | | | |
| RAD_kmer_0002905_1_TGCAGGTAGCCCTTCATGGGTTCGA | 462 | TACAAACCACAAAATCACTAGCAGCACTACCCACAAATACCC | T | W | W | T | GYSNP0833 |
| ACGCACGCGGTAACACCGCTGCCACCCCCTTGCGGGTAGG | | TCACACAACCTCTCCCTCTTTTTCTCTCTCTCACACAC[T/A]CA | | | | | |
| CTGGCAGGTACCCGTAGTAGGTTCCT_NODE_1_length_562_ | | CAAGTCAACACACACACAAAGGTATGCGGGTATAGGAACCT | | | | | |
| cov_78.507118 | | ACTACGGGTACCTGCCAGCCTACCCGCAAGGGGGTGG | | | | | |
| RAD_kmer_0002906_1_TGCAGGTTGCTGCAGGGATTATTTA | 195 | GAAGTTATTATATATAGTTAATAATGAGTCCCAAAATGCAAA | G | G | G | A | GYSNP0834 |
| CCCCAAAAATATGTACTGCTGAATATGACCCAAAAAAAG | | TCCGAACACCCCTTAATAACTTCTGTTTAAATGGAAAT[G/A]A | | | | | |
| TGATATCACAATAAAAGTTGAGGGAGT_NODE_1_length_515_ | | ACCATCCCTGTTCAATTTCACCAGTGCAGGCAAATCGAAGAA | | | | | |
| cov_104.120392 | | AAATACCTATTTTAATTGATGCTGAAAGACCAAGGGA | | | | | |
| RAD_kmer_0002908_1_TGCAGGGTCAATTAATCCGGTCCAC | 523 | GGTTCCTTAGTATCATTATTGTATTGAAAATGTACAAGTCCCT | W | W | T | T | GYSNP0835 |
| ATACATCCTAGGGCTTCAGAGCTTATGTTTCTTGTTTCCGG | | TAGGAAACACAAAAATATCACCAATTTGTAGGCTTTG[T/A]TT | | | | | |
| GTCTCTCCAAGTAGGGTTTGTGGAT_NODE_1_length_608_cov_ | | AAATAGCTTGTTACTAGTATCCACAAACCCTACTTGGAGAGA | | | | | |
| 137.523026 | | CCCGGAAACAAGAAACATAAGCTCTGAAGCCCTAGG | | | | | |
| RAD_kmer_0002909_1_TGCAGGAAGCTACAGATAATGAAC | 156 | AATTTTTAATACAAGCTAACGATTTAAAAAAAAAAAAAACGA | C | C | C | G | GYSNP0836 |
| CCATATATTTAACAAATAACATGTGCACTGGATAAACAGC | | ATCTGCTCTAACTGCCCTGACCAAACCGTTTTGGCCCG[C/G]C | | | | | |
| GGAATTAGTGTCTCCTTTCACATAACT_NODE_1_length_502_ | | CGGCCGGCCCACAACTAATTAGGCCGGTTTGGTTAGCCGTTT | | | | | |
| cov_116.695221 | | TTCAAACTGTAGTTAGTGGCTCGGCCTAGAATTATTT | | | | | |
| RAD_kmer_0002909_1_TGCAGGAAGCTACAGATAATGAAC | 322 | ACCTGCTTAAAGGACAGTGAACGCCCTTGCTAGTAAAAAAGT | A | A | T | T | GYSNP0837 |
| CCATATATTTAACAAATAACATGTGCACTGGATAAACAGC | | TAGCCTGAAGAACTATATTTTTATTTTGATGAAGCTGA[T/A]G | | | | | |
| GGAATTAGTGTCTCCTTTCACATAACT_NODE_1_length_502_ | | TACAATGATCTGCAGGCAAGGTGTCCTGTTATGTTGTACAGA | | | | | |
| cov_116.695221 | | TTAGATAGATATTCAATTAATTTAGCTTTTTTCTGTA | | | | | |
| RAD_kmer_0002911_1_TGCAGGCGGCGCAACGGAGGACCG | 347 | CCCAGCTACTCTTGATTGGCATGGAATTAATTTGAATTAATTT | R | — | A | A | GYSNP0838 |
| AAGTCCAATGTACGGCGGACCGAAGTCGGCGGCAATAAT | | TTGGTTCAAAACCAAAGCAGAAGCAACATGCTGCTC[A/G]TC | | | | | |
| AAAAAAACAAAGAGGAAGGCGGCGGCAA_NODE_1_length_ | | CAAGCCTACGTGTTTTTTGGCCTTTGTTTTAGGTATTCTACAT | | | | | |
| 562_cov_68.583633 | | GGTTGGTTCTTGTTTCATGGCTGACAAAGAAAAG | | | | | |
| RAD_kmer_0002911_1_TGCAGGCGGCGCAACGGAGGACCG | 412 | AGCAACATGCTGCTCATCCAAGCCTACGTGTTTTTTGGCCTTT | R | — | R | G | GYSNP0839 |
| AAGTCCAATGTACGGCGGACCGAAGTCGGCGGCAATAAT | | GTTTTAGGTATTCTACATGGTTGGTTCTTGTTTCATG[G/A]CTG | | | | | |
| AAAAAAACAAGAGGAAGGCGGCGGCAA_NODE_1_length_ | | ACAAAGAACAAGTATTTTGATGATGCTACGGCACCATCTCAA | | | | | |
| 562_cov_68.583633 | | CTGCCATGCCACTTATCCATCGTACTTCTCAAGCT | | | | | |
| RAD_kmer_0002913_1_TGCAGGTAACAAAGTAATATGAAA | 87 | AATCTAGTGTTTTCAAGTCACAGATAATCAAGTTCAAGTGTTT | G | G | A | — | GYSNP0840 |
| ATATTTAAGTGATGTTTGGTATTGCGTTTTGGAAGTGATTA | | GGGTATAGTTAAAACTTTAAACTGATTCTGATTATCT[A/G]AT | | | | | |
| TGTGATAGGAAATATTCAGAACAAGA_NODE_1_length_481_ | | TTTTTACGGGTCAGATAATCGATTTAGGAGTAGCTGCAACAA | | | | | |
| cov_127.507278 | | ATTCGAAAATACAGGTCAGATAATCAATTTAGGAGT | | | | | |
| RAD_kmer_0002913_1_TGCAGGTAACAAAGTAATATGAAA | 266 | AACTTACAGTATCTTAAAGAATCCCACTCAAAACATCTGCAC | C | C | T | — | GYSNP0841 |
| ATATTTAAGTGATGTTTGGTATTGCGTTTTGGAAGTGATTA | | ATCCAATACGGGTCAGATAATCGATTTAGGAAACTGCA[T/C]C | | | | | |
| TGTGATACGAAATATTCAGAACAAGA_NODE_1_length_481_ | | AAATTTGAAAATACAGGTCAGATAATCAATTTAGGAGTAGCT | | | | | |
| cov_127.507278 | | GCAAGTCGGCAACAAACCCGAAAACCTTCAATATCTT | | | | | |
| RAD_kmer_0002913_1_TGCAGGTAACAAAGTAATATGAAA | 383 | AGTAGCTGCAAGTCGGCAACAAACCCGAAAACCTTCAATATC | T | T | T | — | GYSNP0842 |
| ATATTTAAGTGATGTTTGGTATTGCGTTTTGGAAGTGATTA | | TTAAAGAATCACACTCAAAACATCTGCACATCCAATAC[G/T]A | | | | | |
| TGTGATACGAAATATTCAGAACAAGA_NODE_1_length_481_ | | CCTTGTGCAACCTGTTCTGTTACAATTGGTTGTCTTGTTCTGA | | | | | |
| cov_127.507278 | | ATATTTCGTATCACATAATCACTTCCAAAACGCAAT | | | | | |
| RAD_kmer_0002922_1_TGCAGGCGTGGGATGGCGTTTGTTT | 87 | TTTATACGGAAAAAAAAAATCAGCACTTCCATTAGGAATTAG | Y | Y | C | C | GYSNP0843 |
| TTGTGTGTGTGGTTGTAGGAGGGAGGGGTGGGGGTTGGA | | TGTTGGATTCTTTGCGCAACTCCGTGAGTTTTGAATAG[C/T]TG | | | | | |
| GGTGAGGAGTTGGTGACGGGCAAGCAA_NODE_1_length_569_ | | CTGAAGAAAATAATGGAGTTCATATCAGTTCTACTACAATAT | | | | | |
| cov_98.437607 | | TAGCTTATGTGTAATGGAAGGCCACATTTGTACATG | | | | | |
| RAD_kmer_0002924_1_TGCAGGATTGGTAGGGAGGCCATTG | 525 | AAGAAAATACAAGAAGAGCTTTAATGATGACTTCAGATCCCA | G | K | G | K | GYSNP0844 |
| TGTCGGCAAAGGCGAAAATGTAGAGCCACAGTATATATA | | CAATGACATTAAAGCTAATTGATACGATTCAAAGACTT[G/T]G | | | | | |
| TCGTCTTCGGGCAACACTTGTGTAAAT_NODE_1_length_636_ | | AATTGGGTACTACTTCGAAGAAGAAATAAAGAATATGTTAGA | | | | | |
| cov_125.220123 | | AAAATTTACACAAGTGTTGCCCGAAGACGATATATAT | | | | | |
| RAD_kmer_0002925_1_TGCAGGTTAGGAAAATTCAGCTTTG | 158 | AATGACATTGGATCATCTCTTTCAAACTTTATTTTAACCGGCA | R | A | R | G | GYSNP0845 |
| CATACTCACCACGAAGCTTATAAGCCGCCCGATCATACGC | | GGAAAGGTGGCAACATCATAGATTCAAATCTTCACTCA[G/A]TA | | | | | |
| ATAGGCCGCGGCTTCAGCCGACTCAT_NODE_1_length_500_ | | TTCACCATTATCATTAACCTCTAACTCTATTCGTCAGCCACTG | | | | | |
| cov_178.082001 | | GGCTCATCTGTTTACCTGAAACAAAGAGACCAGCT | | | | | |
| RAD_kmer_0002925_1_TGCAGGTTAGGAAAATTCAGCTTTG | 283 | GGGCTCATCTGTTTACCTGAAACAAAGAGACCAGCTCCAGAA | C | Y | Y | C | GYSNP0846 |
| CATACTCAGCACGAAGCTTATAAGCCGCCCGATCATACGC | | ATTCTCCGAACAACACATGGCGATATCGAACCCATTGA[C/T]C | | | | | |
| ATAGGCCGCGGCTTCAGCCGACTCAT_NODE_1_length_500_ | | AAAACCGCATTTCGGTTTGATCGGGTTTCAGATTATTACAAC | | | | | |
| cov_178.082001 | | AATCCTTACAAGAAAAAGCTTTACAGAGGAGTGAGAC | | | | | |
| RAD_kmer_0002927_1_TGCAGGTGTTAATATATTTGTTGAT | 218 | TGTATAAGATTTACGCATCCAATTTAATCGAAAGCAGTGACG | R | A | A | R | GYSNP0847 |
| CTATGTCTTATATTCTTGTACACTTCCCTAGCTCCATGCTA | | CAGTTCGTTATTGTCCTCTTCAAATACGAAAATGTATT[A/G]A | | | | | |
| CTGCTATTATAATAAAATAACCACC_NODE_1_length_594_cov_ | | TTCTGCATTCTTAAAAATATCAGTTTAGTAGTTTGGATATCTA | | | | | |
| 131.851852 | | TCTGAAGAATTTTGCTATGTTGCAGGCCCTTAAGGA | | | | | |
| RAD_kmer_0002928_1_TGCAGGGAAGATAGATAATATGTTA | 159 | CCATGGTTCTAAAAACTAAGAAAAGAAAACAGTTTTGAAAA | C | C | T | C | GYSNP0848 |
| GTTCACTTGAATACTGCATAAATATATGTACAGCGTGAAA | | ACAATTGTGATAAGTTAACATAATTTCAGAACTTACTGA[T/C] | | | | | |
| AAGCATGCACATTGGATTCTTGCTGC_NODE_1_length_494_ | | GATTATTAAGTTTTGGTATTTTACCATTTTAGGGTCAAATGTT | | | | | |
| cov_98.402832 | | GACACTGGTCGAGTATGCTCTATTGTTATACCGTGCA | | | | | |
| RAD_kmer_0002929_1_TGCAGGACTACGGTCCGCTGCTACC | 96 | GTTTCAGGTGCAGCATGATTTCTTTTGATTATCAAACTTAGGC | T | C | Y | C | GYSNP0849 |
| GGCTGCCGCCGCCCTGCCACATCGGATGCCTCTTGCGTGA | | GTCGGACCTAGTGCCTCATAATAATAAACATTTGAAC[T/C]TA | | | | | |
| TTACGGGATCATTTAAAATTGCGAAC_NODE_1_length_527_ | | TGTTATGTTTTGGTTTGTTATGTTATGTTGGTTATTTGAGACA | | | | | |
| cov_53.182163 | | ATTTGTAATTGTAAGATGATGAAATACATGATTGA | | | | | |
| RAD_kmer_0002929_1_TGCAGGACTACGGTCCGCTGCTACC | 466 | GGTCCTTGACTTGTAAGCCCAAACTTATTTCAAAATTCCTTAA | Y | T | C | T | GYSNP0850 |
| GGCTGCCGCCGCCCTGCCACATCGGATGCCTCTTGCGTGA | | GCCAGTAATCTTCAATCCTTAATCTTTAATGACAGTT[C/T]GC | | | | | |
| TTACGGGATCATTTAAAATTGCGAAC_NODE_1_length_527_ | | AATTTTAAATGATCCCGTAATCACGCAAGAGGCATCCGATGT | | | | | |
| cov_53.182163 | | GGCAGGGCGGCGGCAGCCGGTAGCAGCGGACCGTAG | | | | | |
| RAD_kmer_0002937_1_TGCAGGAGGAAAGTTTGTCTAGACA | 116 | TATATACATCTGCATATTTTCTTCTTTGAATTCGACTTGTTTTA | R | A | R | A | GYSNP0851 |
| AGTACATGGTGACGGTACCAAGGTTTATGGCTAAGTAACA | | AAAGACTTTGTGAATGATTGGTTTTAATCCATGAGT[A/G]TTA | | | | | |
| TGAGGGGTAAAAATGGTATTTACAGC_NODE_5_length_298_ | | TAAGGAATTAAGTTCACTAAATTAACCTAAATACACATGTTT | | | | | |
| cov_36.161076 | | TATGATTTCTGCGTAATCACAACTCAAATACTATA | | | | | |
| RAD_kmer_0002937_1_TGCAGGAGGAAAGTTTGTCTAGACA | 236 | ATGTTTTATGATTTCTGCGTAATCACAACTCAAATACTATATG | R | A | R | A | GYSNP0852 |
| AGTACATGGTGACGGTACCAAGGTTTATGGCTAAGTAACA | | AAGGGGGTTACACTTAGATGCTAGCCCAACTGGTTGT[G/A]TC | | | | | |
| TGAGGGGTAAAAATGGTATTTACAGC_NODE_5_length_298_ | | TATTGCCTTTATACTAGGGGCGGGCCGGGTGTTCGAAACCTG | | | | | |
| cov_36.161076 | | TGTCCTGTCTCCAACACGCAGCCTATTATTTTCTTT | | | | | |
| RAD_kmer_0002942_1_TGCAGGCACTTGTGGCCACAAAACG | 161 | CGGAGGTTTTATGCATTAAAAGTACACTTTGGGCGTTTTCAA | T | A | A | A | GYSNP0853 |
| ACAAATTTGGATCAGTTGGATTAATAGGATTGTCATCCAT | | ACCCTTCTGACGGGTTTGCTGTTACCTATTTGAACCTT[A/T]AT | | | | | |
| CTCCATGTTGCATGATTCATGATCTG_NODE_3_length_414_ | | AGATAAAATATAACCTTTATTGATCCGTTCATGGGTAAACAG | | | | | |
| cov_33.219807 | | GTTGAGTTGCCACCTCCTAACTGTTGTGAATGAAAC | | | | | |
| RAD_kmer_0002943_1_TGCAGGTAGTAAAATGGGCGGGTTG | 205 | ATCTAACTCAACGGTTTTCCCCGATTTTAGTAGTTTTAATTAT | C | A | M | — | GYSNP0854 |
| GGTAAAGGAAAATTTTTGGTACACTTTCCGTCTAAGGAAC | | ATTCCTCTACTGTAAAAACGCGCGAATCTTTGATTTA[A/C]AT | | | | | |
| TATAAATAACCAGTTTAAGTTATTTC_NODE_1_length_577_ | | GTATGTTGTTCTTAGGTAGTCAATTTCAATTTTTCTAAAATTT | | | | | |
| cov_113.956673 | | GTCTAAACTCGGAACTCATAAGTAATGGACAAAAG | | | | | |
| RAD_kmer_0002949_1_TGCAGGGACTTATCCTTTAATAACT | 132 | CTTCGGATTGCCTCACGCTTTTTTAAGCCAATGTTACAAACCA | C | G | G | G | GYSNP0855 |
| TAAGTGGCCCGGTTCCGAGGTTTCCTTCTAAGACCTTCAA | | AACACGATTTACAAACCTTTGACATCAAAGAATGGTT[G/C]TT | | | | | |
| GTAAGCTTTTAATCACTCCCCAATCT_NODE_1_length_577_ | | GATTATGCCTTCGTCTCCACCAAATCAGGGCGAGTCCAAATA | | | | | |
| cov_121.298096 | | TGAGCAAAGAGATGCACCCGAGGCTTGTACTGATGG | | | | | |
| RAD_kmer_0002965_1_TGCAGGTACTTCATTCTCTCACTAAT | 232 | GGTTGTTTCTGATAAGGAAAAGAAAATAAAAGTTGGTTCTGA | A | A | G | G | GYSNP0856 |
| TTTCTCCCTCCTCACCTGTTTACGGTCACAATCATTTATCT | | GGGTGATTCAAGGATCACACAACAAAATAGCAACAGCA[G/A] | | | | | |
| TTTTGCAAAACAAATAATTATATA_NODE_1_length_462_cov_ | | AGAAGGCTCTACCAATACTTCATCTAAGGACAAGTCTAAGGT | | | | | |
| 91.774895 | | TTCCGAGGTTCAAAAACCGGATTATATTCATGTTCGAG | | | | | |
| RAD_kmer_0002969_1_TGCAGGACTTCCCCTTCTGATGAAT | 155 | TGTCAATCTATCTCTCCCTCTCTTACGTTATATCTGTAAACAA | A | T | T | W | GYSNP0857 |
| TTTCCATCTTTATAAATGTATAACATTGGCACCCCAGTAG | | GAGTTTTAGGTGAGCAATAACAAAAAATAATTATTGC[T/A]GT | | | | | |
| ACAGCTCTAAGTTGATTACCTTTTAG_NODE_1_length_653_ | | TATGTTCTCTCAGGTATGGTGACGTTCAAGGTCTTAACAAGCA | | | | | |
| cov_118.039818 | | AGCAACTGCTGAAGTATTCGGTAAGGAGCAAGTTT | | | | | |
| RAD_kmer_0002969_1_TGCAGGACTTCCCCTTCTGATGAAT | 332 | TTATGAAGTCCGCCCCCCGAATGGTGAAAGTTTAGAAATGTG | T | W | T | W | GYSNP0858 |
| TTTCCATCTTTATAAATGTATAACATTGGCACCCCAGTAG | | CTTGCAAAGAGCCGTTACCTACTTTAAAGACAATGTAA[T/A]A | | | | | |
| ACAGCTCTAAGTTGATTACCTTTTAG_NODE_1_length_653_ | | TGACCTTTTTTTGTATATTCAAGTTGAAAAGAATCTTTAGAAT | | | | | |
| cov_118.039818 | | CGCTTAGCGTAATAGAAAATGGTGCTGACAATGTTT | | | | | |
| RAD_kmer_0002973_1_TGCAGGGAACAAACCGATAAGCT | 459 | CCAGCATCTTCGGATGGCATTGCTGTGAGTCAACTCGATAGC | C | M | C | M | GYSNP0859 |
| TCGAAGTATAAGAGGTGAAAGTGAAAACTATAACGCCTT | | GGGAATCCGTATGTAATGGATATAAGTGGCGTAAGGGG[C/A] | | | | | |
| GTGCACCTGTTTTCTAGCTCGTGACCTT_NODE_1_length_610_ | | GGGAGGAACCGGATAATCGACGGTCCTGTGGAGAAAGTTGC | | | | | |
| cov_126.324593 | | GGAGAGGCGACAACGAAGGATGATAAAAAACCGCGAGTC | | | | | |
| RAD_kmer_0002981_1_TGCAGGAGTACGTTTTGCATATCAA | 418 | AAATAATGCGATAGTTGTCATTAAGTCAAAATTAGATACTGA | M | C | M | C | GYSNP0860 |
| CTAACCAAAATTCTCTAACTAGTAAAAATAGATAAAAAA | | GTACCCAGTTAAAGGTAAATCAAACTGTTGTTAAATGT[A/C]A | | | | | |
| GAGAAAAGAAGAGAAAAGGTAACATTC_NODE_1_length_674_ | | ATCATGATGGTTTTTTATCCGGTTTTAACTTCACTGTGGATGC | | | | | |
| cov_99.703262 | | ATACTTTACAACAAAGCTAACTTCTTGCTGTGCTGG | | | | | |
| RAD_kmer_0002987_1_TGCAGGTAGGAATAACCTCTTCTTC | 260 | GAAGCGGCTTGATGTTGATTACATTGATCTTTACTATGTTCAT | A | G | A | G | GYSNP0861 |
| TGCATCTCTAGTCCACAAAGACCACTCCAGTTGTACTGCT | | CGCATCGATACAAAAGTCCCTATTGAAATCACAGTTA[A/G]TT | | | | | |
| GTTATTGGATGAATCGCGTGTGCTCT_NODE_1_length_565_ | | TCACTTCTTTTTTATTGGAGCTTATTTAATAAATGTTTGTTCAT | | | | | |
| cov_129.366379 | | GAGCCGAGTTTGAGCTTTGGTAACATAAACAAGC | | | | | |
| RAD_kmer_0002987_1_TGCAGGTAGGAATAACCTCTTCTTC | 425 | CTTGGCTTGGCTTGGCTCGGCTCATTTACAGATATAATATTGA | A | W | W | A | GYSNP0862 |
| TGCATCTCTAGTCCACAAAGACCACTCCAGTTGTACTGCT | | TGCCTGATTTTAAGGAAGAAATTGTTTTGTAGATGGG[A/T]GA | | | | | |
| GTTATTGGATGAATCGCGTGTGCTCT_NODE_1_length_565_ | | ACTGAAGAAACTGGTTGAAGAGGGTAAAATAAAATATATTG | | | | | |
| cov_129.366379 | | GTCTATCTGAGGCTGGTCCAACGACTATTAGAAGAGC | | | | | |
| RAD_kmer_0002988_1_TGCAGGTTCATACAACCGCTACTAG | 105 | TTGGGAACTTTATCGAATCAAAACTCAAAGCTGAAATCTTTTT | A | A | A | T | GYSNP0863 |
| ACAAACAAGAAACACCAGAATCCGTAATGCAGCTCTTTG | | CACTTATAAAGTGTTTGGGAATCAAAGATATAGACCA[A/T]G | | | | | |
| AAACATCAAGATCTCTGAGAAATAAGC_NODE_1_length_510_ | | AACCGGTTGACTTCACTGAAAGTCAATCTTTACGATCATTGA | | | | | |
| cov_91.082352 | | CGATCAAGAACTGCATTGGATTCGGAAACTCTAATTT | | | | | |
| RAD_kmer_0002991_1_TGCAGGTCTGAATTATGCTCTCTCT | 172 | ATTTTAGTTGTTCTATAAGTTAATATTATGTAATCAAATGAAA | R | A | R | A | GYSNP0864 |
| ATCTCTCTCTTTTTTTTCTTTCAATATTGGATGCGGGAAAA | | GGTATTTAAAATTACCTGAGGCAGATAGTGTACCCCA[G/A]AT | | | | | |
| ATGTGCGAGTTGGGTAATAGAATGG_NODE_1_length_554_cov_ | | TTTGTCAAGATATTTAAAAATCTCAAAAGATGCTTCCTCAAC | | | | | |
| 154.027069 | | AGATATCAAACCTGACCCATTAGGCCAATGAGCCAG | | | | | |
| RAD_kmer_0002992_1_TGCAGGAGATGTGCTTGTTTGACCC | 344 | GTTAAATAATCGAAACAGGTTATTCCTTCTTGGTTTGGAAAA | W | W | T | A | GYSNP0865 |
| GTGATTGCAGCTTGAGTTACTGACATGTCACCGTTGTTGA | | ATACGGTAAAGGTGATTGGCGAAGTATATAAGGAATT[T/A]T | | | | | |
| CACTTGTTATGTCATGAATGCTTGAT_NODE_1_length_496_ | | GTTGTGACAAGAACACCAACTCAAGTTGCAAGCCATGCTCAG | | | | | |
| cov_144.965729 | | AAGTACTTCATTCGCTTGAATTCAATGAATAGAGACA | | | | | |
| RAD_kmer_0003000_1_TGCAGGACACCAGGAAAATCAAAA | 332 | TTTTTGGCAGAGTATTATAATTGGAAAATGGTGTTTCAAATCT | C | — | C | T | GYSNP0866 |
| TCCAGATTATGATAATAGATTTAAAACATCTTACAAAATT | | TCTAATATATCAACGAGTTTAAGTAATTAGTAAAATT[C/T]TT | | | | | |
| CTAATAAAAATTTAAAGGTTAGTATCA_NODE_1_length_563_ | | TTTATAGGCTGAATGAATATCTTAGGGATATTATACTGTTGGT | | | | | |
| cov_53.239788 | | AGGAGAACTGTGTGTGAATCTTGAAAGGGCACTTT | | | | | |
| RAD_kmer_0003004_1_TGCAGGAACCAAACTGAAACTGAA | 481 | CTCTCATAACTTAATCAAGCTCGAGCTTGAGCTCGAGCCTGG | C | C | C | T | GYSNP0867 |
| AGCTGCAATATTTTGGCAAAAAGTTCTCCAAAATACCATA | | TCGAGCTCGGCTCGACTCATTTCACCCTAGAAGAAAGT[C/T]A | | | | | |
| CCAAACAAATAAATAAAGTACTAAAAT_NODE_1_length_583_ | | AAGTTAAAGAAGTGTTCCACAAAAGGGTTAACAATTATTTTA | | | | | |
| cov_93.418526 | | GTACTTTATTTATTTGTTTGGTATGGTATTTTGGAGA | | | | | |
| RAD_kmer_0003006_1_TGCAGGTAGGGTCCGAACCAGGT | 189 | TAATAAATCCGTTTGGACCAATTTGGAGGCGATTAGGGCTGC | T | G | G | G | GYSNP0868 |
| ATTTTGTGCATTTCTGTATACAACCTTGGGTGCTTTCCAAT | | CCGGAACTCTCCAGAACAGCCCCTAAATTCTGGACAGC[G/T]T | | | | | |
| TAAAGCCTACATGACCTATTTATACT_NODE_1_length_543_ | | AGACGCGTGTGGAAGGTTCAAAATCAGCCCAACGTGACCCTG | | | | | |
| cov_150.727448 | | GGACACCCTAAAACGGCTGCACAAATCAGCCCCAATG | | | | | |
| RAD_kmer_0003008_1_TGCAGGAGATTCAAGGAGCTCTACA | 510 | AAACGATTTAGATACGCGTAGAAACACAATAATTTTAAGCTC | C | T | C | Y | GYSNP0869 |
| AGTGAGAAATTGAACTTTCGGATTTCAATCCAGGTTTTGT | | TGCAGAAATCAAATATCTTGACAAATCTAAAGCTCCAA[C/T]T | | | | | |
| AGTTTTAAACCTTTCAATAAATTTCA_NODE_1_length_602_ | | TGTTAAAAAGAGAGTCGAATGCAACATGAAATTTATTGAAAG | | | | | |
| cov_76.803986 | | GTTTAAAACTACAAAACCTGGATTGAAATCCGAAAGT | | | | | |
| RAD_kmer_0003009_1_TGCAGGCTGAGAAAGCCAAGGTGA | 143 | ACATGTAAATCATATATTCTTACCATGGGAAAAGCAAGATAA | Y | Y | Y | T | GYSNP0870 |
| TCCAAACACTGCTTTTTCTTTCAGGATTCAACACATTAATG | | TATAGTCCAAGTCCAGTAAATGTAACAAGAGGAACCAA[T/C] | | | | | |
| CAAACCATGTTTGGTACTAGATTACC_NODE_5_length_394_ | | GAAAGAGGGCTAAGATAGCTATACATGATTCAAGGTTGCAAA | | | | | |
| cov_31.497461 | | AATATAACTAAAAATAAAAAAATAATAAAAAAATAAAA | | | | | |
| RAD_kmer_0003009_1_TGCAGGCTGAGAAAGCCAAGGTGA | 303 | ATAAAATGAATTTGATCAAATCAAACACTTTACTTGACAATG | M | M | M | A | GYSNP0871 |
| TCCAAACACTGCTTTTTCTTTCAGGATTCAACACATTAATG | | TTTCTCCACACGCCAAGAAATCCAAGAGTTGTCTGTAA[A/C]G | | | | | |
| CAAACCATGTTTGGTACTAGATTACC_NODE_5_length_394_ | | CGGATGCCACGACAAGAGCACCTTGTATGCCTCTCATCGTTT | | | | | |
| cov_31.497461 | | GTGCAAATCTCTTAAAAGTACCCGCGTCAAACCATAT | | | | | |
| RAD_kmer_0003015_1_TGCAGGTTAGAAGGTATATTTCTGT | 369 | ACCGCTGTGTCAAAGCTATGGCCGACAAAACTTAAACTATGC | A | G | A | G | GYSNP0872 |
| CGGTGACCGCTGAAAAGTTTAAAGATAAGATTGTGGTCA | | ATTTAACATCACACCGGCCTAAATGCGTATACAAACAA[A/G] | | | | | |
| AGATTTCTTGCCATGTTTTACCGTTGT_NODE_1_length_641_ | | CCAACCAATGTTATGTATCATGGTAAATGCCAATGGAATGGC | | | | | |
| cov_148.524185 | | CGCTTTCAACAAAATTTATAACACCACGTGAAACCGTG | | | | | |
| RAD_kmer_0003018_1_TGCAGGATTTGAAGCCCCCACCTGT | 275 | GAGTCGATGGGGTTTCATATGCAGAATGTTCCCTCACTTAATC | A | T | A | W | GYSNP0873 |
| TAGAGATAGAGAGATGAAAGCCATGTAAATAGTATTAAG | | GTCTCATGCTTACTGAAGCCAAGGTAAAAGTAAAGTT[A/T]AT | | | | | |
| CTTTATATTATTTATGACGACATCCAA_NODE_1_length_547_ | | TATTTTATCATAATGATCAGTTTTCACTTACTTTTTCTTTTTCT | | | | | |
| cov_105.170021 | | ACTTTTTTTTACAATAATGTTTTTCTTTTAAATA | | | | | |
| RAD_kmer_0003018_1_TGCAGGATTTGAAGCCCCCACCTGT | 361 | TTTATCATAATGATCAGTTTTCACTTACTTTTTCTTTTTCTACT | A | T | A | W | GYSNP0874 |
| TAGAGATAGAGAGATGAAAGCCATGTAAATAGTATTAAG | | TTTTTTTACAATAATGTTTTTCTTTTAAATATTTGC[A/T]GACG | | | | | |
| CTTTATATTATTTATGACGACATCCAA_NODE_1_length_547_ | | GACAAAATACAAGTGCTTTTTAAATTTATATATATTTCAATTT | | | | | |
| cov_105.170021 | | TTATTGTAATGATTGTAACCAATGTTTTTATAA | | | | | |
| RAD_kmer_0003018_1_TGCAGGATTTGAAGCCCCCACCTGT | 492 | TTGTAATGATTGTAACCAATGTTTTTATAAACTGACCGGATGA | C | — | G | G | GYSNP0875 |
| TAGAGATAGAGAGATGAAAGCCATGTAAATAGTATTAAG | | TAAACATGGTGTTTTACTGATTTAAGAATTGGATGTC[G/C]TC | | | | | |
| CTTTATATTATTTATGACGACATCCAA_NODE_1_length_547_ | | ATAAATAATATAAAGCTTAATACTATTTACATGGCTTTCATCT | | | | | |
| cov_105.170021 | | CTCTATCTCTAACAGGTGGGGGCTTCAAATCCTGC | | | | | |
| RAD_kmer_0003019_1_TGCAGGGTAGAGGTAAGTTTGTCTA | 148 | GTTATTGGCATTAAATCCTCATTTTTCTCGAGCATTTACTCTCT | A | G | G | G | GYSNP0876 |
| CATCTTACCCTCCTCAGACCCTACCTTAGCTTTGCTATTGG | | TGGATACTGTAGCTCTCATTTACTATGCGGTGAGCC[G/A]GGT | | | | | |
| TGGGATTTACTGAGTATGATGATGA_NODE_1_length_523_cov_ | | AAATGGGTAACATCTCTGTAGTGAGGCTAACAGTTGCTTTGT | | | | | |
| 76.814529 | | ATTGCACAACTATTCTAAAGTCCCGCCTAATCGCC | | | | | |
| RAD_kmer_0003019_1_TGCAGGGTAGAGGTAAGTTTGTCTA | 224 | AGCCGGGTAAATGGGTAACATCTCTGTAGTGAGGCTAACAGT | C | T | T | T | GYSNP0877 |
| CATCTTACCCTCCTCAGACCCTACCTTAGCTTTGCTATTGG | | TGCTTTGTATTGCACAACTATTCTAAAGTCCCGCCTAA[T/C]C | | | | | |
| TGGGATTTACTGAGTATGATGATGA_NODE_1_length_523_cov_ | | GCCCACCAAACACAAACACAAGCACATTGTTGCAACATATAC | | | | | |
| 76.814529 | | ATATTGCTACTCTTGAGAGGAGAAGAATTAAGGTAGC | | | | | |
| RAD_kmer_0003019_1_TGCAGGGTAGAGGTAAGTTTGTCTA | 415 | AGCTTATTGTTTAACCCCCCAAAATAGTCCTGGTTACATCATC | G | R | R | G | GYSNP0878 |
| CATCTTACCCTCCTCAGACCCTACCTTAGCTTTGCTATTGG | | AACTACACCTAATGCCATGGCTCTAATTCAATCATTT[A/G]CA | | | | | |
| TGGGATTTACTGAGTATGATGATGA_NODE_1_length_523_cov_ | | GCCCTTCGTTTTCTCAGCATCAACTAGACCTAATCTCATCATC | | | | | |
| 76.814529 | | ATCATCATACTCAGTAAATCCCACCAATAGCAAAG | | | | | |
| RAD_kmer_0003020_1_TGCAGGTTAACAATGCAAGACATGT | 206 | CAGTTTCCATGACAGGTGATCCTTCTTTCTTTTTTCTTTCTAGT | A | R | R | G | GYSNP0879 |
| TGGGGACATCAATTCAGGAGATTCATCCTTCCAAAAGGTT | | TTTATAATAGTGTTATATATCTCGCAATCTCGACCC[A/G]CTTA | | | | | |
| GTTAATACTTTTTGAACTGGTGAGGT_NODE_3_length_365_ | | CTTAAAAGGGCTAATCAGGTATTATTTTATTTTTTTGATGGGT | | | | | |
| cov_50.430138 | | CAAACAGTTCGATAGCTGCCCAAAATGTATTTT | | | | | |
| RAD_kmer_0003020_1_TGCAGGTTAACAATGCAAGACATGT | 311 | ATTATTTTATTTTTTTGATGGGTCAAACAGTTCGATAGCTGCC | Y | Y | T | Y | GYSNP0880 |
| TGGGGACATCAATTCAGGAGATTCATCCTTCCAAAAGGTT | | CAAAATGTATTTTTAGAGCAAAAACCATACTAAATTG[T/C]GA | | | | | |
| GTTAATACTTTTTGAACTGGTGAGGT_NODE_3_length_365_ | | TATTGAATAAAGTTTATTATTTTGATAATTTATATATATTTTTA | | | | | |
| cov_50.430138 | | ATGTATATATGTTGTTGATTTATTGTGATAATGT | | | | | |
| RAD_kmer_0003023_1_TGCAGGTTTTGTAACGGGGAAGAAA | 130 | CGTAGAATTGCCTTTTTTCTTCTTTTCGTTAATCATTCAGTTG | C | — | Y | T | GYSNP0881 |
| AGAAGACGTTGTGGAGGGGCAGCCGGACAGTGGTGACTG | | TTGCCAACGGTTTCTTTGAGGTCGGAATCGAAACGT[T/C]TGG | | | | | |
| GTAGTAGCGGAGGGTGGCTACGAGGCG_NODE_1_length_494_ | | GTTATCACAACGATGGAACGGTATGATAGCCGGTATCATGAA | | | | | |
| cov_64.419029 | | ATCGTTCACATTAACAAAATTCGTTTGGACCAGCG | | | | | |
| RAD_kmer_0003035_1_TGCAGGAGCCGGAGCCCTCTCATCA | 88 | TGTGATTGTTTTTCTGCGCTGCTTAAAGCATCCAGAAAATCTG | R | A | A | — | GYSNP0882 |
| ACACTCCGATCAGATGCTCTGCACTTACCAATGCCGCCAA | | CTTTGACCTGTAAGAACAATAAGTATTTCACTACAAC[A/G]TG | | | | | |
| CTCGTAATCCTCTCTCTCTCTCTCTA_NODE_1_length_617_cov_ | | AAAAGTAGAAAAGTAAGAAAATAGCAAATGACTAAGCCTCA | | | | | |
| 116.458672 | | CATACAATTTCACACTTCATTACTAAGTCTTATTGTC | | | | | |
| RAD_kmer_0003040_1_TGCAGGGAGGAATGCTAGGTACAG | 159 | TTATTCAATAGAACGATTACACTGAGAAATCAAAAAACTAAC | A | R | R | R | GYSNP0883 |
| TTAATCTTAGAAATAATATGACGCTGTGGCATATACTGGG | | AAAGAAGACGGGATGGCTAAACAGCTTATTCGAGAAAG[A/G] | | | | | |
| CGAGCATGTTAAAAAAGGTCGAATATA_NODE_1_length_537_ | | TGCTGAGCTTTCTCTCTCCCAAAAAGCTGCTCAACGAGTGCA | | | | | |
| cov_107.378029 | | AGAGCGTATTCCATGGTGGTTCCCAAGCCTTGACTAGT | | | | | |
| RAD_kmer_0003041_1_TGCAGGTTTACAGTACGATAATTCG | 272 | TTATTCCTCCCAATTTCGCCATTTCTATAACTATTTCTAAACCC | T | T | Y | Y | GYSNP0884 |
| GGCTTTTGGTAAGGATAAAAGGGTGGCTGCAGCTGTTGCT | | AACATAAAACTCAAGAGCCCCAAACCCGTCTTCCAT[T/C]CTT | | | | | |
| GTTGTAGAATGGTTGAAGCTGAAGAG_NODE_1_length_598_ | | CTGTACGCCAACAATGCTGTCGAATACGAAGCTGGAGACGGA | | | | | |
| cov_151.672241 | | GACAACCCCTTCGTTTTAATCTCATTAAAAACTTC | | | | | |
| RAD_kmer_0003041_1_TGCAGGTTTACAGTACGATAATTCG | 373 | TGTCGAATACGAAGCTGGAGACGGAGACAACCCCTTCGTTTT | C | T | C | Y | GYSNP0885 |
| GGCTTTTGGTAAGGATAAAAGGGTGGCTGCAGCTGTTGCT | | AATCTCATTAAAAACTTCTAACGCTTTTGTTTCGTCCC[C/T]TT | | | | | |
| GTTGTAGAATGGTTGAAGCTGAAGAG_NODE_1_length_598_ | | GAGCTAACGAAATCCCCATCAATGTGTTGTAAGTCACCACAT | | | | | |
| cov_151.672241 | | TTGGAATCACACCACTGCTAACCATATCATTGATAA | | | | | |
| RAD_kmer_0003041_1_TGCAGGTTTACAGTACGATAATTCG | 525 | CATTGATAACCTTCTCCACATGATCAAACTCTTCCGCTTGTT | G | A | G | R | GYSNP0886 |
| GGCTTTTGGTAAGGATAAAAGGGTGGCTGCAGCTGTTGCT | | AATCGCACCCAAAAGACTATTATATATAAACAAATTC[G/A]G | | | | | |
| GTTGTAGAATGGTTGAAGCTGAAGAG_NODE_1_length_598_ | | CCCCGGGCTCTTCAGCTTCAACCATTCTACAACAGCAACAGC | | | | | |
| cov_151.672241 | | TGCAGCCACCCTTTTATCCTTACCAAAAGCCCGAATT | | | | | |
| RAD_kmer_0003045_1_TGCAGGGATGGTTTTTATTTAATTA | 381 | GAGGTTTATTGTTAAGGTAGTGAAAGAGCTGTTATGCAAAAA | C | C | Y | Y | GYSNP0887 |
| CTTTTTGGAAAACAAAAACGAAATATAAAAATTTATTAGG | | GAAAAAATGAAAATTGATATGTTTTATGCAATTAGTTT[C/T]T | | | | | |
| TTATATCCTAGGGGTTTCACAGGATA_NODE_1_length_568_ | | CAATAATATTATTAAATTATTAAAATACAATATTATTAAGTTA | | | | | |
| cov_109-846832 | | TTAATAGATAATCTTTATAACCCATTTATTCTATAA | | | | | |
| RAD_kmer_0003050_1_TGCAGGCGAAACCACCGTTAAAAC | 212 | CAGATATCATGATAAAATAGTTGAGGTGCTATAGGTGTATAA | R | G | R | G | GYSNP0888 |
| ATGACAACACTGAGGGATTGTAAGCTTTGGTGACCGTCCA | | CTATGAAATAGAGAGGCTAAAGCCCATGGTGTGAAAAA[G/A] | | | | | |
| GGCGGGGAAAGGTTTGAGCGATAAGAT_NODE_1_length_352_ | | GCGGGAACTATATATTAAAGCATATTTGCTTAGCAGCCACAA | | | | | |
| 52_cov_205.315338 | | ACCAAACCCTAGCGGCCACCCACCATGAACACCATCTT | | | | | |
| RAD_kmer_0003052_1_TGCAGGCGGAGAACCTCCACCACAT | 393 | TTCATATTCTACACCAACATATGGTATTCATGTGTATCCGATT | — | A | A | W | GYSNP0889 |
| TGATCGTCTATTCAGTAAGCGTCATTATTCATTCGATGTTC | | TATGTCTGAAGACGAGCAGGTCTATACGTACATAACT[A/T]TA | | | | | |
| TCTCGTTTAGTAGCTCGACAATTTG_NODE_1_length_594_cov_ | | AGTATGAAAAATTTTAGATAGCTTACTTGTATTCGTATTAGAC | | | | | |
| 90.597641 | | TATTAGTAGTCAATGCAAGAGAACCCAACAGTGGC | | | | | |
| RAD_kmer_0003053_1_TGCAGGGATGGCTAACATGTCAGCC | 100 | CATTCTTTTAGTTAATATAAAAAAATGATTAATTAACTAGTTT | Y | Y | Y | Y | GYSNP0890 |
| ACCGGGCTACTACAAAAAGCAGCTCAAATGGGGTCCACA | | CTTAAATAAGTAAGGTTCGTATTTGATTTCACGTGTA[C/T]AC | | | | | |
| AGAAGCACAAACTCTAGGGTTTCCGGT_NODE_1_length_408_ | | AAATATAGAATTTATAGCATGTGAAATATACGTGTAACAGTC | | | | | |
| cov_39.399509 | | ATCACAAAAAGAAAAAAGTTGTTAAAACTTACAACT | | | | | |
| RAD_kmer_0003059_1_TGCAGGATCGAGTATCGACACTGAA | 150 | AACATGACAGTCTTGGTTACATAAAAGTCAATGCCATAAAAT | T | W | W | W | GYSNP0891 |
| ACTCCACCTAATGATGGAGAAAACGCAACACCTAAGCTC | | ATATATCTATATGTGTATGTGTTAACATTAAAACGATA[A/T]A | | | | | |
| CAAGAAAACGGTAATTTATATTCTTAC_NODE_2_length_574_ | | AAATTCGCAATTTTTCTGGTCGCCAACTTAAGATGAGTGAAT | | | | | |
| cov_46.202091 | | AATCAATATATAATAAAAAAAATATGCTGAAATTTGA | | | | | |
| RAD_kmer_0003061_1_TGGAGGTTAAACGAAGAGATTTTCT | 343 | TTGTGGTGGTCGGCAGTGGTTGTAGATGATAAAGGGGCGGTG | K | G | K | — | GYSNP0892 |
| TTAGGAACGATGGTGTTGCATGTGGTGGGTGGAGACGAT | | GCTGTTTATACTGACAGTGATTTTGTTGAGTGGTAGTG[G/T]A | | | | | |
| GAGATTTATGGTTTGCGATGGTCGTGA_NODE_1_length_555_ | | GGCAGGTAGGGGTGGTGGTAGCAGGTTGGGTCGATGGTAGC | | | | | |
| cov_88.661263 | | AAAGGTAAATAAAGAGAGAGAGAGAGAGAGAGAGAGAG | | | | | |
| RAD_kmer_0003061_1_TGCAGGTTAAACGAAGAGATTTTCT | 397 | GACAGTGATTTTGTTGAGTGGTAGTGGAGGCAGGTAGGGGTG | A | G | R | — | GYSNP0893 |
| TTAGGAACGATGGTGTTGCATGTGGTGGGTGGAGACGAT | | GTGGTAGCAGGTTGGGTCGATGGTAGCAAAGGTAAATA[A/G] | | | | | |
| GAGATTTATGGTTTGCGATGGTCGTGA_NODE_1_length_555_ | | AGAGAGAGAGAGAGAGAGAGAGAGAGCCATGGTTCCCACCG | | | | | |
| cov_88.661263 | | CTCACCAGCCCAGCTACCCATCTCTGCCGCCATTCCCCT | | | | | |
| RAD_kmer_0003064_1_TGCAGGATAGAGTGAAGTGTTTGGG | 132 | TTGCCGGGTGTCACACCACATCAAACAACATTTAATACTTTG | — | A | G | G | GYSNP0894 |
| GTTTTGTTTCAGGGTTTCTGGTTTTACTTTGTCTACAATTT | | ATTCATTCCCACATGGCAACCAAACAAGACATGGAATG[G/A] | | | | | |
| ACTATTATTATTTTTATCTACTTT_NODE_1_length_595_cov_ | | TAATGATTCATTCCATTACCTCGTCCATTCCAATCCTTCATCC | | | | | |
| 72.547897 | | ATTCCATTACCCCATACCAAACAGACCCTAAGCTAAT | | | | | |
| RAD_kmer_0003064_1_TGCAGGATAGAGTGAAGTGTTTGGG | 199 | AAGACATGGAATGGTAATGATTCATTCCATTACCTCGTCCATT | — | T | G | G | GYSNP0895 |
| GTTTTGTTTCAGGGTTTCTGGTTTTACTTTGTCTACAATTT | | CCAATCCTTCATCCATTCCATTACCCCATACCAAACA[G/T]AC | | | | | |
| ACTATTATTATTTTTATCTTACTTT_NODE_1_length_595_cov_ | | CCTAAGCTAATAGATACATAATGACTAGAAATCATCCTTTTC | | | | | |
| 72.547897 | | ACTCCACATCAAACCATCATATCTATACCCCATTTT | | | | | |
| RAD_kmer_0003065_1_TGCAGGGGCTGGTCAGGTTACTAAA | 118 | TCACTTTTCTCAGAGAAGCGTCTGAATTCGCGTACCCTGTAAA | C | C | M | M | GYSNP0896 |
| GAAAAACTTGAATTCAAGCATAGACTTTCAATAGCTCTTG | | AATATACAGGATCAGAATAATATTTCAGAGAAAAAAG[C/A]G | | | | | |
| GGGCAGCTAAAGGTGATCCTCTGCAA_NODE_1_length_575_ | | AATAAGAAAAAGAAAACCATGAAAAGAGTATAACTCTGGAG | | | | | |
| cov_110.361740 | | CAAGGAATATGTCATCAATTCTAATTTGAGAAGATGGG | | | | | |
| RAD_kmer_0003065_1_TGCAGGGGCTGGTCAGGTTACTAAA | 184 | TTCAGAGAAAAAAGCGAATAAGAAAAAGAAAACCATGAAAA | G | R | R | R | GYSNP0897 |
| GAAAAACTTGAATTCAAGCATAGACTTTCAATAGCTCTTG | | GAGTATAACTCTGGAGCAAGGAATATCTCATCAATTCTA[A/G] | | | | | |
| GGGCAGCTAAAGGTGATCCTCTGCAA_NODE_1_length_575_ | | TTTGAGAAGATGGGCCCGCTGAGTCAACTCGCCCCAAGAAAT | | | | | |
| cov_110.361740 | | TTCGGACACCTGCATCTGCAACTTTGGCTATGAAGTTC | | | | | |
| RAD_kmer_0003066_1_TGCAGGGAGACTTCGTCCTCAGGTT | 86 | CACTAAAAAACCCCAGTTACTATTTTGTTAAAAATTTCTTTCC | K | — | T | K | GYSNP0898 |
| CACGGACAAACCTTGAAGTACAACATGAAACTTAGAGAG | | AAAGTATATGCTATTTACAAAAAATAACGATGAGAAA[T/G]G | | | | | |
| GGTCGTGGGTTTTCTCTTGAGGAATTA_NODE_1_length_585_ | | AGAGTTTACCTTCATTTTCCGTGCTCTCCTTGGGAAAACAACC | | | | | |
| cov_125.111115 | | AATTTAGCCTTAAATGTTTTCAGCCTCGCACGTTA | | | | | |
| RAD_kmer_0003066_1_TGCAGGGAGACTTCGTCCTCAGGTT | 328 | CCTGCAGCCTGTGTAAAAAAACAAAAATAACATTTAGTGATT | R | — | G | G | GYSNP0899 |
| CACGGACAAACCTTGAAGTACAACATGAAACTTAGAGAG | | TGGGTTGTATCATACACAAATCAATAAAATAGTTTACC[G/A]T | | | | | |
| GGTCGTGGGTTTTCTCTTGAGGAATTA_NODE_1_length_585_ | | TGCCTGTATCACAGAAAACAATCTTCCTAACAATGATATCAT | | | | | |
| cov_125.111115 | | CTCATGTGTCTAATTAAATATAACATGAGTCCTATAC | | | | | |
| RAD_kmer_0003067_1_TGCAGGGTTAGTCAAAGATTAATTT | 153 | TTTGAACCAGCCTAAAAAAGTACTCTTTCTGAATTTTGACACA | C | T | T | Y | GYSNP0900 |
| ATGCTTCATTTATTATTTATCAATAGATGTTGATTATATTT | | ACCCAGTTTTGTCATGTAACACAACCCACATGAAATG[T/C]AA | | | | | |
| ATTTACTTTTATTTAAATTTTTTAT_NODE_1_length_603_cov_ | | CAGATGAAACCCTGATAAATCATTTTCTTCAAAAACTATATT | | | | | |
| 103.018242 | | ATTACTGAAATAATGTTTGTAATCATATGTCACCCT | | | | | |
| RAD_kmer_0003067_1_TGCAGGGTTAGTCAAAGATTAATTT | 392 | TCATGTGGGCCCAAACCGTTTTGACCCTTTACACAAACCCGC | C | T | T | T | GYSNP0901 |
| ATGCTTCATTTATTATTTATCAATAGATGTTGATTATATTT | | CTAACCAGCCCATCTTCCACATCAAATTATAAGTTAAT[T/C]G | | | | | |
| ATTTACTTTTATTTAAATTTTTTAT_NODE_1_length_603_cov_ | | AAAGGAGGGGCAATTAAGCATATAATGTTGCAGGTTTACCTT | | | | | |
| 103.018242 | | CATTCCAGGCATTTGGACCCACTCAATAGCAGTTCCA | | | | | |
| RAD_kmer_0003068_1_TGCAGGCAGTTTTGAACATCAACAA | 137 | TTGTCAATTGTTAAGATTTACTAAATTTATTAGGTTTTTTTATG | — | C | Y | C | GYSNP0902 |
| CGAGCTCTAGAACTTCAAAACCCTTATTCAAGATAACACC | | GACCCAGGACTTGAAATCAAGCAGAAGGTTGACTCA[T/C]CC | | | | | |
| AAACATAAGCATTGATTTAAACATTG_NODE_1_length_554_ | | CTTTATAATCACACGCTCGCCACCATTCTGGTGGAATATGCTT | | | | | |
| cov_53.424187 | | CTGCGGTAAGCTCACTCTGGTTTGTTATGCGCTAT | | | | | |
| RAD_kmer_0003070_1_TGCAGGGATATGAATGAATCGTGA | 192 | GTAAAATTAACTTGATTTTTATATTAAAACCTATTAGCCCAAT | G | G | R | R | GYSNP0903 |
| AAATCGTATTGTGTGTGTGTTTAGTTTAATTTAGACTTGTA | | TCTTGAAACAATCATTTGGATGCAGGGAAGGAATAAG[G/A]G | | | | | |
| CACGAACCGAACGGACACAAACGGG_NODE_2_length_393_ | | TATCTTTAAATGTTTATTTGACTATTTACTTAATTATGTCATTT | | | | | |
| cov_31.737913 | | TGTGCTGTACATTTGTGTTTGTTTATGCTCGTTCG | | | | | |
| RAD_kmer_0003079_1_TGCAGGAGAGGGTATTCGGACGTG | 297 | CAGATCACCCCTAAGCTAAAGTTATCAAGTAAATCACACACA | — | T | C | T | GYSNP0904 |
| GCACCACCGTGCCCCTCCCTGCGGCCCCGCCATTCAACGC | | TCAACATAAACAGAAAAAGAGATCGTCATCCTTCGAAA[C/T] | | | | | |
| CCCTCACAGCCCCGCTGCCTCGCGAGT_NODE_1_length_557_ | | ATCAATCTAAGCTCTCCTGCTTTCGATCCATTTTTAAGGAGAA | | | | | |
| cov_104.605026 | | TTCATAAGAGTAGAGAAAATTATTATGTGAAAATAAT | | | | | |
| RAD_kmer_0003079_1_TGCAGGAGAGGGTATTCGGACGTG | 428 | GAGTAGAGAAAATTATTATGTGAAAATAATAACTAAAGTGGT | A | A | T | A | GYSNP0905 |
| GCACCACCGTGCCCCTCCCTGCGGCCCCGCCATTCAACGC | | TTATAAGAGAAACGTGATTTCCTTTAATTATTTTCTTT[T/A]TT | | | | | |
| CCCTCACAGCCCCGCTGCCTCGCGAGT_NODE_1_length_557_ | | TCCTTTGACTGCTTTTAAACGGTGATAAAATAAAAACTGTCTG | | | | | |
| cov_104.605026 | | AAAATCAGTTGGGTGAAGGACTCGCGAGGCAGCGG | | | | | |
| RAD_kmer_0003090_1_TGCAGGCTACTCAAATAACACATCC | 520 | CTCCAAAGAGGCACAAAAGTCTGATTAAAAAAAGAAAAAAA | Y | Y | Y | Y | GYSNP0906 |
| AGCTGGTTGTGCCAATGTTTTGGGTGCCAAAGGCAATGGA | | ATCAGGAAAGGAAAACATGAATGATTGTATGGTATGTTA[C/T] | | | | | |
| TTGGGCTGGTTCAGTACCCTCTTAAT_NODE_1_length_606_ | | TTGTAGTTAGACCATTACATGATTAAGAGGGTACTGAACCAG | | | | | |
| cov_158.711227 | | CCCAATCCATTGCCTTTGGCACCCAAAACATTGGCACA | | | | | |
| RAD_kmer_0003092_1_TGCAGGTGAATAACTCAACATAAAA | 205 | TTCAGAAATTGTGTCAGACTAGCAATTTTATATTTTTTTTACC | A | G | A | A | GYSNP0907 |
| AACAGGTGCCACCTTTAATAGCAGGCGTTCAGTTGTCATA | | TGAGACGAACATGTTTATTGATTTGGAATTTGTCTCT[A/G]TT | | | | | |
| ATATGTTGTTGATCAGACTTTGTAGT_NODE_1_length_556_ | | GTGATCGTAGGTTGGTTGTAAAATAAATTCGTTCCTTCACTGC | | | | | |
| cov_71.924461 | | TATCATACGGTTGATGGAACAGAGGTAGTCGGTGA | | | | | |
| RAD_kmer_0003092_1_TGCAGGTGAATAACTCAACATAAAA | 272 | GGAATTTGTCTCTATTGTGATCGTAGGTTGGTTGTAAAATAAA | G | R | G | R | GYSNP0908 |
| AACAGGTGCCACCTTTAATAGCAGGCGTTCAGTTGTCATA | | TTCGTTCCTTCACTGCTATCATACGGTTGATGGAACA[G/A]AG | | | | | |
| ATATGTTGTTGATCAGACTTTGTAGT_NODE_1_length_556_ | | GTAGTCGGTGATTGCTCCTGCAATATTGGTAAGTAATATCTA | | | | | |
| cov_71.924461 | | ATTTCATTTTTGTTGATTTAGACTCTGCATTGATGA | | | | | |
| RAD_kmer_0003094_1_TGCAGGCCTAGGTATTTACATCCGA | 165 | CTTTTCTACATTTAAGTTTGTAAGTCATGACCCATAGAGAGTC | T | G | T | T | GYSNP0909 |
| ATCGCTGATCCATTATGGTCTCTACTGAATATTAGAATTTA | | CTTGTTAGTCACAATATTTCAGATATGATCATCAAAG[T/G]TG | | | | | |
| CAACAGCAAATAACCATATTAAGTT_NODE_1_length_603_cov_ | | TATTCCATGTACTCAGATCCTATGTCTAACCCACTTAATTTAC | | | | | |
| 99.592041 | | CATTTAGGAAAATACTCTTATTACCATTGTAACAG | | | | | |
| RAD_kmer_0003097_1_TGCAGGAATGAAGGTTCTGTATTTT | 180 | TACAAAAAAGATTCTTATATACAATCCCTTTTTTTTGGTTTCT | T | T | C | T | GYSNP0910 |
| TTTTCTCACATTTAGTTGTGAACATGCTTGATGATTCGAGC | | GAAAACTGATTCTTTCAGATATGTATAGAGTTACTAA[C/T]TG | | | | | |
| TATATATAAGAGTTTAGTTTGTTGC_NODE_1_length_269_cov_ | | ATAAAACACAAGAGAATCTAACCAAAGAAAACTGAATACCT | | | | | |
| 15.892193 | | TCTTCCCCTTGGAGGCTTATTGACCTCGGTAACAAGT | | | | | |
| RAD_kmer_0003098_1_TGCAGGAACCAAAAAGGTAAATTA | 113 | GACGACCAACAATGCTCCGCCCATGTATTAGACCATTTAATT | R | G | R | A | GYSNP0911 |
| TAATATTTTGGTTTTGTGAATTATTAATCTAGAAATGACAT | | TACACAAGTGTATAAATAAAAGAAATACAAAGAAAAAT[A/G] | | | | | |
| TTTGAAATACGTGAACTAAGTGGATG_NODE_1_length_226_ | | ATATAACTCATAAATCTGTAAACAATGATGGTCAATATGTTT | | | | | |
| cov_107.707962 | | CCATTTTTGTAGCATACCAACAATTATAGTGTTTTTTG | | | | | |
| RAD_kmer_0003099_1_TGCAGGAGAGTTGACAGCTCCTCCA | 464 | TTGGGTCAAATTTGTTTCCAGGAAACAGAGGAAATGATAGCA | A | A | W | T | GYSNP0912 |
| AGTCTTCGACTGATGTGTGCGGATGAACCAACCCACCTCT | | GATGTTCTTGGTGTAGAAGTATTTAGACAGACAATTGCT[A/T]G | | | | | |
| ATTTGAAAATGCACAATAACTCCCCA_NODE_1_length_542_ | | GGAATGTTCTTGTGGGGAGTTATTGTGCATTTTCAAATAGAG | | | | | |
| cov_110.959412 | | GTGGGTTGGTTCATCCGCACACATCAGTCGAAGACTT | | | | | |
| RAD_kmer_0003100_1_TGCAGGCTGACATAACAATGAAGTT | 335 | ACGCAACCGTTGATGGGGAAGAGAGGTACCAAGATGATGGA | R | A | A | R | GYSNP0913 |
| GTACTTTATTTTAATATGAAACAACATTTAACATCAACCG | | TACTTCCTATGAGTGGTAGCTTCCACGGCCCGGGGGCTA[A/G] | | | | | |
| AATGCATCTATATATACCTTCCTCTA_NODE_1_length_596_ | | ATTTGGGATTGACTTTTTTGTTAGTTTTAGTAACATGGATATA | | | | | |
| cov_79.748322 | | AAGATGAGAAAGGCAACCAAAATTTGTAACGGGTGAA | | | | | |
| RAD_kmer_0003104_1_TGCAGGTTTTCTAAGAGCCCAAAAG | 181 | GGCTGGCCTTGGAATCTCGCGAGCTCTCTTCTTCATTGTCAAC | T | A | A | A | GYSNP0914 |
| AATGGCAACCCAGATAACTCTAGACCCAAAGCTAACTCG | | GCATGGTTCGTCGCTTTTATAGGATCGTCGCCCGATA[A/T]CT | | | | | |
| GCCACCTCGCTTTTGCTCACCATAACC_NODE_3_length_421_ | | TGATAAATAATTCGGATGGTCGAACAACGGCTGAGGATTTCT | | | | | |
| cov_30.520189 | | TGACACCGCCGAAGTGGATTCCTTTTCCGAGTAAAC | | | | | |
| RAD_kmer_0003104_1_TGCAGGTTTTCTAAGAGCCCAAAAG | 273 | ATTCGGATGGTCGAACAACGGCTGAGGATTTCTTGACACCGC | C | A | M | M | GYSNP0915 |
| AATGGCAACCCAGATAACTCTAGACCCAAAGCTAACTCG | | CGAAGTGGATTCCTTTTCCGAGTAAACTATGCTACCGA[C/A]A | | | | | |
| GCCACCTCGCTTTTGCTCACCATAACC_NODE_3_length_421_ | | GTATGAGGCCAATTGGATGATGGACGGTCTTTCTGTTAATGC | | | | | |
| cov_30.520189 | | GTCGGGTGTTTCGGATGCGTATCGTTCGGGAATGGTT | | | | | |
| RAD_kmer_0003105_1_TGCAGGTTCTTTACCCCTGCACACTT | 561 | GCTGTTCCGACTTCAAGGGTGATAGGCACGAGGTTTTTGATG | G | A | R | A | GYSNP0916 |
| CAGCCAACAACCACCTCTCTCCTCGCTTCTTTTGTTCCCTT | | TTGCTAACAGTCATGGCAGGGTGAAACTTGGAGTCCAT[A/G] | | | | | |
| TTCTTTCTCACAGCAGCTATGGAC_NODE_1_length_619_cov_ | | GCTGCTGTGAGAAAGAAAAGGGAACAAAAGAAGCGAGGAG | | | | | |
| 68.969307 | | AGAGGTGGTTGTTGGCTGAAGTGTGCAGGGGTAAAGAACC | | | | | |
| RAD_kmer_0003112_1_TGCAGGTGATCAAATACATTTAAAT | 199 | TGTCGCGAGGTTAACACAGATGCAAGCCTTATAGGAGAAGGT | K | — | T | T | GYSNP0917 |
| TTCCTAGTCTTTATGTCAACCTTTTGAATCCTTACGTTCAT | | TTATCAACCACCTATAGAGAAAAAGAAACAACGTAAGG[T/G] | | | | | |
| TTCCTTCACAAGTTTTTATTTTCTT_NODE_1_length_656_cov_ | | AATAATATCATATTCCATGTACTACATGTGACGAGTGAGTCA | | | | | |
| 126.795731 | | TCTTAGAGGCAATAGAATTGGTAGTTGGTATGCAATAC | | | | | |
| RAD_kmer_0003112_1_TGCAGGTGATCAAATACATTTAAAT | 375 | AAATTCCATACTGAACTGAAGGTGCATTTCCCACACCGCCAA | T | — | T | Y | GYSNP0918 |
| TTCCTAGTCTTTATGTCAACCTTTTGAATCCTTACGTTCAT | | CTGACATTTGAGGCATTGCTGGTAGAGTCCCAAAAGGA[T/C]T | | | | | |
| TTCCTTCACAAGTTTTTATTTTCTT_NODE_1_length_656_cov_ | | TGTAATAGACTGCGGTTGTGGGCTCTGATTGGCAGGCCTGCC | | | | | |
| 126.795731 | | ACATTAAAAATAGGAAAGCATTGAGAAGTTCCCAACA | | | | | |
| RAD_kmer_0003116_1_GCAGGCACATTTTTTTAATTTATAA | 224 | TAACCTCGGATATTGTTTCAAAATACAACACCTATATGTATC | A | A | G | G | GYSNP0919 |
| ATTAAGGGTATGTTAATTAAAGACAGGATATTTAAAAGTA | | TTATCCCACCGATACCTTTCTGTTAGCTTCTTACC[G/A]TTA | | | | | |
| ACTTTTAAATATTACAAGGGACTGT_NODE_1_length_555_cov_ | | TGTAGAATATGTTATTGATGTTCACACATTCTTGTCTTTTGGC | | | | | |
| 91.875679 | | CAGTTAATAATATATGCATTTTGTTATGTACTTA | | | | | |
| RAD_kmer_0003120_1_TGCAGGTACATCTTTTTTACAATGTT | 331 | GTAGTCATAACAATGTTATTAAACTGAGGTTTAAAACCCAAT | — | C | S | C | GYSNP0920 |
| TTAGTAGCACTGACTTGAGAATGTTTTCTTCTTTATGTCAT | | CATATTTGTACTAAATACCATATTACACAAAATCAAGA[G/C]A | | | | | |
| AATCTTTTCTGGGTCCCACAGCTG_NODE_1_length_534_cov_ | | TAAAAAGAGTAAAATTTTAGATAAATATGTGAAGTGCAATAC | | | | | |
| 143.539322 | | CTGGTTTCTTGAGTGCCTCTAAATGCTATAACAATAG | | | | | |
| RAD_kmer_0003130_1_TGCAGGGGGTGGCAGCAACAGCAA | 351 | AGCAATTGAAAACATATCAAACAAGTTACACTTATCAATCCA | A | W | A | W | GYSNP0921 |
| CAGCAACAACACCACCAGTAGCACAACCAGCTCATCCGA | | ACACTACCTTTTATGTCGTGTGTAGAATTTTCACCTAA[A/T]A | | | | | |
| TGAGGAGACCCTCGAAGAAGCTAGAAGA_NODE_1_length_ | | AAATATGCATTAATTATATTCCTTTCATCCTTTTTAGAACATG | | | | | |
| 606_cov_165.981842 | | ACGTGTTTCTTCTATGCCTGAAGCTGTAAACTCCAA | | | | | |
| RAD_kmer_0003135_1_TGCAGGAAGTCAAAATCATGTGTGA | 133 | TTTTATATATATTATAGTGCATTAATATCTATGCGACATCTTA | C | Y | T | C | GYSNP0922 |
| AAGTGTGAAACAGGCATTTAAGCTTAAAAAATTGCATTTT | | ACAAACATTTTATCACTTTATATTAGATTTGTCTATC[T/C]CGG | | | | | |
| CTGATACCGAGGAATTTGAGATTGTT_NODE_1_length_557_ | | AAAGCTTCCGGGATATAACCTAGTAGTTTGATATGTAAAACA | | | | | |
| cov_122.166969 | | TATGAGAAAGACGCAACTTCTGGTTTAAAATAGAT | | | | | |
| RAD_kmer_0003135_1_TGCAGGAAGTCAAAATCATGTGTGA | 423 | TGTGTAACCTGCCTGCTAAATTGTTCTCGTCATTAAAATTTGT | M | A | A | C | GYSNP0923 |
| AAGTGTGAAACAGGCATTTAAGCTTAAAAAATTGCATTT | | TATCTTAATTCAGGTCAATATACCGAGTTTGCTTCTA[A/C]CA | | | | | |
| CTGATACCGAGGAATTTGAGATTGTT_NODE_1_length_557_ | | CGCATCAAAATGGACGCCCTACAGACAATGGGAACAGTAAG | | | | | |
| cov_122.166969 | | ATCATTGCTTATATCATACTTTTTTAAACAATCTCAA | | | | | |
| RAD_kmer_0003136_1_TGCAGGACCGTCAATAGACGGAAT | 318 | TGGCTTCAGTTGAATCCAGTTTTGCAAGCTTCCAAGCACTGAT | G | G | A | R | GYSNP0924 |
| GGATCAACAAAGCTTGCAATCTTCTCCAACCAGCTCAGCT | | TCGAACTGGACGGTTAGGTGGTCGTTTACCCTTGTCA[A/G]GT | | | | | |
| GTCACTGCCATGAGTGGCAGGAGCTCC_NODE_2_length_446_ | | GGCTGGACCGCATCTGGATCCACCGTTGATGGAAGCCGTCCA | | | | | |
| cov_32.984306 | | GGCTCTAGATGGGCTATGACTTCATCCTGATGTTAA | | | | | |
| RAD_kmer_3003139_1_TGCAGGCTTTCTATTAGTTAAATGA | 87 | CTATGGTCATATCAAAACAATTTTATTTAACCATGAGACAGG | A | C | C | A | GYSNP0925 |
| AGTTTATCAAGTAGTATTATGTGGTGTGTTTTTGCTTTTAC | | CAAATCGTTGGTTGCGTATCTACATTTACTCACCTAAA[C/A]C | | | | | |
| TATGTCAATGGTGATTACCATGATA_NODE_1_length_575_cov_ | | CTGAGTATATCATACTGTAAGCGGTTAATAATAATATATATTT | | | | | |
| 83.224350 | | GATACAATGTCACGTAAATTCAATATCAGTGGGAAA | | | | | |
| RAD_kmer_0003139_1_TGCAGGCTTTCTATTAGTTAAATGA | 322 | ATTAGCCATGAAAAATCATCATCAAATTAAGCATTCATGCTT | — | A | T | T | GYSNP0926 |
| AGTTTATCAAGTAGTATTATGTGGTGTGTTTTTGCTTTTAC | | GTCTATCCCATGAAAAATCTGATGGTATCTTTTTTGTA[T/A]A | | | | | |
| TATGTCAATGGTGATTACCATGATA_NODE_1_length_575_cov_ | | ATCGCGGTATCTAGTTGACTAAACCCACAAGATCTGAAGCTG | | | | | |
| 83.224350 | | TAGATTTATGGTAACAGCATCTTAAGGTTTGGTACTC | | | | | |
| RAD_kmer_0003139_1_TGCAGGCTTTCTATTAGTTAAATGA | 385 | ATGGTATCTTTTTTGTATAATCGCGGTATCTAGTTGACTAAAC | — | C | T | C | GYSNP0927 |
| AGTTTATCAAGTAGTATTATGTGGTGTGTTTTTGCTTTTAC | | CCACAAGATCTGAAGCTGTAGATTTATGGTAACAGCA[T/C]CT | | | | | |
| TATGTCAATGGTGATTACCATGATA_NODE_1_length_575_cov_ | | TAAGGTTTGGTACTCACGGCCTGGTGCGTTTACACGAAACGA | | | | | |
| 83.224350 | | TTGAAAAATACAAAAAATACTTAACCAACAACATAA | | | | | |
| RAD_kmer_0003142_1_TGCAGGCATGTGGTCTGAAGAATAT | 193 | AAATAAATAACTTGTTTAAATTTGTATCCAGGTGATGCATTTG | G | A | G | A | GYSNP0928 |
| TAAGATGTTACTGAGGATGTTGGTTGTGGTTTATGAACTC | | TTGGGGGATTTTTGTCTCAGTTGGTACTTGAAAAGCC[G/A]AT | | | | | |
| GTGGTGTAGCGGCACATATCAGAAAC_NODE_1_length_653_ | | TGCGGAATGTGTGAGAGCCGGGTGCTATGCATCCAATGTTAT | | | | | |
| cov_182.837677 | | TATCCAAAGGTCAGGGTGCACCTATCCAGAGAAGCC | | | | | |
| RAD_kmer_0003142_1_TGCAGGCATGTGGTCTGAAGAATAT | 578 | ACGTCTGAGGTATATACAACAGTTAATAAATTTTGTTGCAAA | T | C | T | C | GYSNP0929 |
| TAAGATGTTACTGAGGATGTTGGTTGTGGTTTATGAACTC | | CTTGCAAAGGCTGAGTGGTTGATTCTGGGTTATATACA[T/C]T | | | | | |
| GTGGTGTAGCGGCACATATCAGAAAC_NODE_1_length_653_ | | GTATGATGTGTTTCTGATATGTGCCGCTACACCACGAGTTCAT | | | | | |
| cov_182.837677 | | AAACCACAACCAACATCCTCAGTAACATCTTAATAT | | | | | |
| RAD_kmer_0003144_1_TGCAGGCTGCAACCTAAATTCACAC | 130 | ACATATGCCTCACCTTGCTTCTCCCGGGGGATCGAACTTGCGC | C | T | T | T | GYSNP0930 |
| TTGACACTTTAATCTTTCTTTCATTTATGTATGTCAACATT | | CTCCAAGGAGGAACACAAGCCAACCAACCGGTTGATC[T/C]G | | | | | |
| GGTTTTTGTCAAAATGGAACTAAGC_NODE_2_length_474_cov_ | | GGGATATTGACATAACCATTTGTGTAACTAACTACCAAAAAT | | | | | |
| 61.016876 | | AAAAACTATTACTTTTTGTAACTCTACGTGTATAGTT | | | | | |
| RAD_kmer_0003146_1_TGCAGGGGCTGGTGGAACGCCATG | 145 | TCAATTGACATTGATTGCTTGTATGATGGAACAGATTTTTCAA | T | G | T | — | GYSNP0931 |
| AAGAGTAAATTCATCAAGTAAGATGTTGTCTTTCACATTA | | TAAAGGTCACCCGGGCAAAATTTGAGGGGCTAAATAC[T/G]T | | | | | |
| CTACACTCACCCTGATGCACATCAACG_NODE_1_length_411_ | | GCTTTTTTAAGAAGTGCATTGAGCATGTGGAAAGTTGTTTAG | | | | | |
| cov_44.459854 | | CAGATGGGAATATACACAAAAACAATGTTGATGATAT | | | | | |
| RAD_kmer_0003152_1_TGCAGGTCCAGCAGCAGCATCTAAC | 466 | AGTTGGGTTCTTGCACAAGTGGGAAAAGCTCAAGTATGGCAT | — | T | C | T | GYSNP0932 |
| AAGTATAGAGGGAAAATATTACTATTTTATGAAATGAAA | | GCACTAAGGTTCCTTATATACTGCTGGAGCAATTCGTA[C/T]G | | | | | |
| AAATAATCAAAGCTCAATTTTGGAAGT_NODE_1_length_598_ | | AATGGGATCTATCAGAGGAACCCATTCGTGCGAATGACTCAT | | | | | |
| cov_100.981606 | | GGCATATCAAGAAAAACAAATTTAACTTCCAAAATTG | | | | | |
| RAD_kmer_0003159_1_TGCAGGACTGAATCAGAAATCGTAA | 350 | GAGTTTGCCCATGTTTAACACTTCTTACGGGTATGCTTTCATC | Y | C | Y | C | GYSNP0933 |
| ATGAAATCTTGACGAGAATCTTGCAGGACACGCAAGATG | | CTTTAAAACATCATCGAGGATTTTTTGTTGTAACTTG[T/C]ATA | | | | | |
| CATCACCGGTAGATCTTAGTCATCTTA_NODE_1_length_634_ | | AATCACTATCATGTTCCTTGGTGATGTCCTTTATATATCCAAT | | | | | |
| cov_127.227127 | | AAAGCTACTTCCTTGAAATCTCTTTCGAATGCCC | | | | | |
| RAD_kmer_0003162_1_TGCAGGTTATCTCCTGAAGTGATAC | 456 | AACAATAATCAATGTCATTACTACTGAATTTGACAAATACAA | K | — | G | G | GYSNP0934 |
| CGGTTCTGATGTTTAATAAAACTCGTTTTAACAAAAGTCG | | TTTAAAATTCTTTTAAAGAAATGGGTTAAAGATCACCG[G/T]C | | | | | |
| TTTCGAGAGTTGAGATCATAAGCTCA_NODE_1_length_561_ | | TGAATGGGGCTGCTATTACTAATGCCCCAGACCGAATGTTGA | | | | | |
| cov_169.946518 | | GCTTATGATCTCAACTCTCGAAACGACTTTTGTTAAA | | | | | |
| RAD_kmer_0003173_1_TGCAGGTAGACCATTTTGCCCTCAC | 152 | CAATTTCTTTTAGAAAAAAACAGTAAAATGTAGAGAAAGATG | G | R | R | G | GYSNP0935 |
| AATTGTGCCAAAACCGCGTAACATTCTAAAATGACCGCTT | | AGCTAGTTCTTACGGTGGTTGTTCGAGGTCTAAAGTGA[G/A]C | | | | | |
| TACCCTCACAAGTTTATACATTTTAT_NODE_1_length_453_cov_ | | ACAATCTCTCAACCTAGCCAAAGGTAAACCTTTCTTTGATAA | | | | | |
| 163.125824 | | AGGATAACTCTCTTGATCAACTATCCCAATATGCAAC | | | | | |
| RAD_kmer_0003177_1_TGCAGGGTTGATCACATCAGTAATA | 459 | GTTGTCTTGCAAGACTGTGACATCCAGGCCCGTCGCCCCAAT | Y | C | Y | Y | GYSNP0936 |
| GACGATTGCATCACAATTGTTCTCGAGTACAACTTCCACG | | CCCAAGCAAAAGAATATGGTCACAGCTCAAGGCCGAAC[C/T] | | | | | |
| GCCTTCCAAGATACGTTGGAAAACTG_NODE_1_length_601_ | | GACCCTAACCAAAACACGGGCATTGTTATTCAGAAATGTAGA | | | | | |
| cov_123.156403 | | ATTGGTGCAACATCTGACCTCCAACCTGTTCAAGCCAG | | | | | |
| RAD_kmer_0003177_1_TGCAGGGTTGATCACATCAGTAATA | 537 | ACCGACCCTAACCAAAACACGGGCATTGTTATTCAGAAATGT | S | S | S | S | GYSNP0937 |
| GACGATTGCATCACAATTGTTCTCGAGTACAACTTCCACG | | AGAATTGGTGCAACATCTGACCTCCAACCTGTTCAAGC[C/G]A | | | | | |
| GCCTTCCAAGATACGTTGGAAAACTG_NODE_1_length_601_ | | GTTTTCCAACGTATCTTGGAAGGCCGTGGAAGTTGTACTCGA | | | | | |
| cov_123.156403 | | GAACAATTGTGATGCAATCGTCTATTACTGATGTGAT | | | | | |
| RAD_kmer_0003185_1_TGCAGGCTGCAGCATGTGTCATTGT | 541 | AACAAAACCAATAAATAACGATAAAATGCCAATATTCATTAC | G | C | C | C | GYSNP0938 |
| TTAACTATTATATTACTTTAAAGTTTTTACTTTGCTTATAG | | ATATTAATTAATAGCATTGACATGTTCATAAAAATTAA[C/G]C | | | | | |
| CTTTTGTTTACTTAAGGTTATTGGT_NODE_1_length_604_cov_ | | AATAACCTTAAGTAAACAAAAGCTATAAGCAAAGTAAAAAC | | | | | |
| 82.645699 | | TTTAAAGTAATATAATAGTTAAACAATGACACATGCTG | | | | | |
| RAD_kmer_0003187_1_TGCAGGACAAGAAAAATATTTACCA | 137 | CCAGTAAGGCAGTAATAAACCTGATTATTTTTCACTGATGCA | — | R | A | R | GYSNP0939 |
| ATAGAAACTAAAAACATACATTATGTAATGACTATAATCA | | AACTAAAATTAGCCTCATAACATTAACTTTACCTTGTG[A/G]T | | | | | |
| AATATTCAAATAACAACCAATTATAA_NODE_1_length_596_ | | AAACAGAAGAAAATGCCGACCAAGCAAACGGCAAAATAGAA | | | | | |
| cov_103.889259 | | AGACAGCAGTTGTCTTCTGTTTCAACAGCTTTGCTTTT | | | | | |
| RAD_kmer_0003193_1_TGCAGGTAGAAAAACTCATCAAATA | 144 | TGTCACGAGATGTCTTTGATTTGTTTCTATGTTTCCTTTCTAAA | A | R | A | G | GYSNP0940 |
| TAATCCTCTTCCGAGCTAAATCAGCCTCACTAAAATTTGTT | | CCAGATTAAGTTTTTTAGGGAACACTGTGGTATCCA[A/G]TGT | | | | | |
| GGCTGGTGAATCCCAATATATGCCT_NODE_1_length_614_cov_ | | TCCAATATCAAAGTAGCTTCTGCACAATTGATGTTTTCCTCAT | | | | | |
| 123.912048 | | ACCTTTGTAGCCTTATTCATTTGATCATTTATGT | | | | | |
| RAD_kmer_0003201_1_TGCAGGCTGCACCTCATGTATAAGT | 319 | ATCTTGGAAAGAAACCAGATACATACGTACCATAAGTTTTTG | C | Y | Y | T | GYSNP0941 |
| ATAATATAACTTGGTCAACCGTTTTACCGATTGAAATCAA | | CAGATGTATAGTTAAAAGGCATGACACGTGGAACAATA[T/C] | | | | | |
| GATTTGTATTAGATATGGAAGTGATG_NODE_1_length_622_ | | TGTCGGTTAGTTTGATTGGTTTGAGTTTGGCCTGATGTGTCAT | | | | | |
| cov_102.881027 | | CTGCACCATCTCCTTCAAGTCTCCAAACAGAAACCGG | | | | | |
| RAD_kmer_0003205_1_TGCAGGTGGTGTCAACATCGTCGTA | 421 | CAGACATGGATACATTGAGCCACGCAACTGTAACGACACCTG | A | W | W | A | GYSNP0942 |
| CTTTTAGCTTGCATAGTTGTACAGCCAGTGACATGAGTTT | | CAGTCTCTCTTGGTCAAAGTCAAGTAAACTTAGGTACA[A/T]A | | | | | |
| GACCTGGAGAGACTGCAGCTGCAGGT_NODE_1_length_598_ | | CAAGCAGGCTCAAAATACAACCGTGTTGACGCCTACTGCAGG | | | | | |
| cov_92.068565 | | CTCTCTTGGTCAAACTCAAGTCAACGTATGTAAAACA | | | | | |
| RAD_kmer_0003205_1_TGCAGGTGGTGTCAACATCGTCGTA | 497 | TACAAACAAGCAGGCTCAAAATACAACCGTGTTGACGCCTAC | M | M | M | M | GYSNP0943 |
| CTTTTAGCTTGCATAGTTGTACAGCCAGTGACATGAGTTT | | TGCAGGCTCTCTTGGTCAAACTCAAGTCAACGTATGTA[A/C]A | | | | | |
| GACCTGGAGAGACTGCAGCTGCAGGT_NODE_1_length_598_ | | ACAAACCAAAGTCAGGGTACAACAATGTTCACACCACCTGCA | | | | | |
| cov_92.068565 | | GCTGCAGTCTCTCCAGGTCAAACTCATGTCACTGGCT | | | | | |
| RAD_kmer_0003215_1_TGCAGGCGGGTTGCCACCAATGTTA | 110 | TGTTTTTTCATAAGCAAGCGCAATCGAACAAACACATAAATT | G | G | R | R | GYSNP0944 |
| AACCGCACCTCTAGTAAGGCAACATCTGCTCAAAAGGGA | | TGAATTTACATGTCGAAAAAGATACTAAGCCGAGCATC[A/G] | | | | | |
| CCGCCAGCTGGAGGGGCGCCAAAAATG_NODE_1_length_576_ | | AGGTCTTTCTTTGTCATCTCCTCCCAAAAATCTTTAACTTGTTC | | | | | |
| cov_154.821182 | | TTTAGTGAGCCCGTCTTCGACATCTATATTCCTACG | | | | | |
| RAD_kmer_0003228_1_TGCAGGATTTAATCCGCATGGCGCG | 227 | GTGTAGTGGTTTGAGGTGCATTTCCCTAATGGGAGGTCACAT | T | — | Y | T | GYSNP0945 |
| GGCCAGTGGGCTTAATGACCCCGCGTGCAATGGTGTTTCC | | GTTCGAGACTCGGTTTGAAGGAAAGTGTCTTTTTTTTT[C/T]CA | | | | | |
| CATTCAAACAACTAATATTCCCACCG_NODE_1_length_577_ | | AGGTATATTAAATATAACAAATGGTATTTCATGTTAAACATA | | | | | |
| cov_128.161179 | | ATTGGTTTCATAATAAAACACAAATTGGGTTCGTGG | | | | | |
| RAD_kmer_0003229_1_TGCAGGAAGTTTAAGCCACATCTCA | 125 | CAAGTTATGAATATGTACCTTCTAAGGTAAGATCATGAAGAT | T | C | Y | T | GYSNP0946 |
| TAGGTTTGGGTCCAAATTGAATTAACAAATGGGCATATTA | | GCTTACTCTCAAATCACTTTTTTTGGAATTTAAACATC[C/T]AG | | | | | |
| ATAAAACATGGTCTGACGTCTCCTCC_NODE_1_length_632_ | | CACAATTCACCCATAGGATATCTGATAATCCATCGTTGGATTC | | | | | |
| cov_138.335449 | | CCCCATTTGAATAATGATGTATTAATCCAGATTGA | | | | | |
| RAD_kmer_0003232_1_TGCAGGTTCACAACAAGGATGAATG | 320 | GTATAACTTCAGGTAGCCGGAGGGGATCCCCTTCTAAAGCTT | Y | T | Y | Y | GYSNP0947 |
| GAAGTTTTTTCCCAGCTTCCGACTGTGACACAAAAAATGG | | ATAGCAGTTGACTGGTTTAAACTTGAAACTTCCAGAGG[T/C]A | | | | | |
| ACTTAGCATAACCAACAGAATTACGG_NODE_1_length_582_ | | AGTGGCTTTGCATCCCAAATGCCTTGTTCAGGTACTATATTG | | | | | |
| cov_112.609962 | | ATCATTTTTTATGGAATACTTTGTGTAACACAGATA | | | | | |
| RAD_kmer_0003235_1_TGCAGGTTTGTATTTTTCATTTAATC | 432 | AAGCCCATAATTAGTTATAAAAGCTGGTTCCATTAGAATTTA | M | C | M | C | GYSNP0948 |
| TTATTTATTGAGATGTCAAGCTTGGCATCCACCCCCTCTGT | | TAAAATAAATGAAATGAATTAACCTACCTGCAGCCTAG[C/A] | | | | | |
| GCTCGATCTTTATCTACTTATTAC_NODE_1_length_626_cov_ | | AAAAGCTTCCTTGCGCTTCTGGTCCTCCCCAAGTGACCATTGA | | | | | |
| 123.880188 | | TATTTTAAGTATGCATATATTACTTGTGGTGGCCCAT | | | | | |
| RAD_kmer_0003238_1_TGCAGGCACGCAGTTACAAGGTGTT | 303 | GTTTATTCTCGAGTTGGGGGTCTCTCTGGAAGCAGCCTCTCTA | C | M | C | M | GYSNP0949 |
| ACACCACATTGATGGCACTGAACCGCCTGCCAAAACAGA | | TTCCTTGGTATAGAGGTAAGGTTTGCCTACATCCACC[C/A]TC | | | | | |
| TCCTGACTACGCTAACTGGGCCAAAAT_NODE_1_length_577_ | | CCCAGACCCTATTAATAGCTTTGCTATTGGTGGGATTTTACTG | | | | | |
| cov_142.596191 | | GGTACGATTGTTTATTAAAGTGGGTTTGGATAGGG | | | | | |
| RAD_kmer_0003243_1_TGCAGGTGTACCTAATATGTTACCG | 587 | CGGCTTCTAAAAGTATAAGAGGTAACATCATTTATCATCATA | C | — | T | C | GYSNP0950 |
| ACTCATTCCTAAGAACGCTTACTCATTTCGTTAAATCTTTT | | AATTTCCAACTTAATTCCTTTTTCAGAAGAGAGTGTCA[T/C]G | | | | | |
| GTGTATTTTATCACTAATATAATGT_NODE_1_length_688_cov_ | | ATCTTAAAAATATTTGTTTCCTGATCAAACCGAAAACATTATA | | | | | |
| 77.991280 | | TTAGTGATAAAATACACAAAAGATTTAACGAAATGA | | | | | |
| RAD_kmer_0003252_1_TGCAGGGTTTTnCCAACATATATA | 139 | CCAATAATACACGGCTGCTTACTTAGAAGCTAGGCTCTATGT | C | A | C | C | GYSNP0951 |
| GTTGTTTTGTCGCAAATGCGTAGGAAATCCATGTTTGCAA | | CTATCGTGATTAGTATTTTCTTTTTATATTAAAACAAT[C/A]TA | | | | | |
| TGTATTTCTCACGAAAAAAGTGAGTC_NODE_1_length_534_ | | AAAAATAATATAGTTTCGCGTTTTTATTGCAAGCAAGTGATT | | | | | |
| cov_98.808990 | | GATATGTTATTAACAACTATGCTCTATCTCTCACTG | | | | | |
| RAD_kmer_0003258_1_TGCAGGATCGATTGAGTCTTTCATA | 400 | GAAACAAAAATTAGATTATCAGTAAAAAATTTAAAGAATCA | A | W | W | T | GYSNP0952 |
| GAGGTACAGCAGAGAATGGGGCGTTTGGTTAGATCATGC | | AGGTTGTTGTCAAACCGGTGCTTTAATTATGTCTGCGAG[A/T] | | | | | |
| AACTTTAAATCAACTCCACATGTTGAT_NODE_1_length_534_ | | ATCAAGCACACAGTCCTTGAAAAACTGTGAGAGCTGAGTCGT | | | | | |
| cov_157.155426 | | GTAGAGCTCGGGCTCATGCCTAAAATGATCAACATGTG | | | | | |
| RAD_kmer_0003261_1_TGCAGGCTTCACTATCTTCATAATTT | 138 | GAAGGGGTATAATGGCCAACAAATTATATAAATAGACATGCC | S | S | C | C | GYSNP0953 |
| CCACACCATTTAAAATCTCGTTCTTCCTCACAACTAGTACT | | AAAGCTTTGATTATGTTGTAATAGATTACACATGATTT[C/G]T | | | | | |
| CAAATCCGACAGGCCAACTCCCCG_NODE_1_length_632_cov_ | | ATTTACTTGAAAACTAAGTTTTGTTCCGTTTATCACAACTCAT | | | | | |
| 113.767403 | | GCTGTAGTACTTGTTGCTTCCTTGTATCTTGGGAAG | | | | | |
| RAD_kmer_0003261_1_TGCAGGCTTCACTATCTTCATAATTT | 290 | CTTGGGAAGCGAATTAAATGTAGGTGGTTCATGGTTCAAAGT | C | — | M | C | GYSNP0954 |
| CCACACCATTTAAAATCTCGTTCTTCCTCACAACTAGTACT | | TAAAACCTTTTAACGGCACCCTTTGGAGAGTTGGGTTC[A/C]C | | | | | |
| CAAATCCGACAGGCCAACTCCCCG_NODE_1_length_632_cov_ | | GATGAAGAGTTTTTAACAATAAAATCTGCAAAAATTGTTAGT | | | | | |
| 113.767403 | | ACTGAATCAGTTTTGTTTAATTTAACATGGGGGTTTT | | | | | |
| RAD_kmer_0003261_1_TGCAGGCTTCACTATCTTCATAATTT | 371 | CGATGAAGAGTTTTTAACAATAAAATCTGCAAAAATTGTTAG | C | — | C | T | GYSNP0955 |
| CCACACCATTTAAAATCTCGTTCTTCCTCACAACTAGTACT | | TACTGAATCAGTTTTGTTTAATTTAACATGGGGGTTTT[C/T]GG | | | | | |
| CAAATCCGACAGGCCAACTCCCCG_NODE_1_length_632_cov_ | | TTGATTCGGATCGCAGTGTTCGGTATTAGTTAGATTGCATTTT | | | | | |
| 113.767403 | | TGTGATATAGGAAGCTTGTCATTGAATCAGTTGTA | | | | | |
| RAD_kmer_0003263_1_TGCAGGAGAGTATATGAGATCCTTA | 249 | AGGCGACCGAATTCACTCCTGAAACTGCCTCCAGGTGATGTA | — | R | A | A | GYSNP0956 |
| TAGAAAAAGTAAAAGGCACTTAGTTCATGCAACACTCAT | | GGATTTGAACAATACACCACATCCCATTCTGCATACAA[A/G]T | | | | | |
| ATTTCGAATAATCAATTATTTGAAAGT_NODE_1_length_465_ | | ACATGAATTGGTGAGATTTCAGCAGAATCATTAACACTAAGA | | | | | |
| cov_121.587097 | | ACAAAAGCTGTTGCTACAAAATAAGGCCAGGGTCGGC | | | | | |
| RAD_kmer_0003267_1_TGCAGGTAAAGACATAACATTTGTA | 310 | GGACCTTGCCATACAGCTTGAAATTGGATGTATATAAGAATT | A | T | W | T | GYSNP0957 |
| ACAGAGAAACAAACAAACACGGAGGTTGATGACGGGAGC | | AGTACATACACATCACTTTGTTTTGTTTCTATGGATCC[T/A]AT | | | | | |
| TTGAGAACCCATATTTATTTCTACAGC_NODE_1_length_536_ | | ATGAACCTGTTGAGTTCTTAGGGTTTAAACGTGGTAATTATGT | | | | | |
| cov_82.916046 | | TTCAGTGTTAGTTTGAGAGATTTACAGCATCACAT | | | | | |
| RAD_kmer_0003269_1_TGCAGGAAATCCGTATTTCCCCTAA | 236 | CAAAATGGAATTTGAGCTCACGGAGAAACTTGGCTGTTAACA | T | C | T | — | GYSNP0958 |
| TTTAGGCATTCGCATATGGCCATAAACACTCTCGATTTCA | | AACCCATACTTTCAATTGAAAGATTGAGATTTTATCAA[T/C]A | | | | | |
| CTCTATTCCAACATTCAAAAGATACA_NODE_1_length_641_ | | TAAAAAAGCATACCTTTAGGAATTGTTCTTGGATTTTTTTATT | | | | | |
| cov_84.702026 | | CGAATGGGTAAACTTTATTTGCTAGTGTTTGTTATA | | | | | |
| RAD_kmer_0003280_1_TGCAGGTGGGACTAAAGGATCGGG | 315 | CGAGCTTTGAGCGAGCAGATCTCAAGTCGCTCATGAGCGGCT | T | T | A | T | GYSNP0959 |
| TTTGTTTTCGTCGCCGGGTAGCAGTCCGAATAAAAATATG | | TAACTCGTTTCCACCGGTGTTTATGCAACACGTAGAAT[A/T]A | | | | | |
| CTGCGGTTCAAGACGGATAGCTCGGGT_NODE_1_length_620_ | | TAGAGCACAAAAGCATCATTAAAAGCAAACCCTAGTTGGCA | | | | | |
| cov_75.119354 | | AGATTCACACATTCACACTTGAACTACTCATTGACCCA | | | | | |
| RAD_kmer_0003292_1_TGCAGGATCTCCAAGTAAACGAGTG | 494 | CCCATCTATTCCTGATGAACCAATGTTTTGTGGGTCTGAGTCC | A | T | A | A | GYSNP0960 |
| TCAAGAACCTTGGAGAGGGTGTACTACTGTCGTCTCCTAAGC | | AGGTTCAAGCGGCTCGAGCCACTCAACGTCTTCTGCA[A/T]AC | | | | | |
| ACGAGTCAATGGCTAGTTTTGGGAGT_NODE_1_length_589_ | | TTCTAGCACTATGGGTTCCTTCCGGTTCACTCCCAAAACTAGC | | | | | |
| cov_185.045837 | | CATTGACTCGTGCTTAGGAGACGACAGTAGTACCC | | | | | |
| RAD_kmer_0003293_1_TGCAGGCACTTATATATTCATCATTT | 467 | AGACAAACTTACCTTTGATGGGGTGTCACCATGTTATGGGAT | W | W | A | W | GYSNP0961 |
| GAATGCCACAAGTAATTAGTGTATTAAATAAGAATACAA | | AAAAGCGTTGTCTATATGAATAAATGTAAAGAGTGTTT[A/T]C | | | | | |
| AACTATATTTTTGAAATAAAGGGTAA_NODE_1_length_638_ | | ATCATCTGACATGTTTTAATCCAGAACTGGAATGAATGAAAC | | | | | |
| cov_121.394981 | | AGGATACATATTTGGATGGCCTTGAAGAAGCAAAGTA | | | | | |
| RAD_kmer_0003300_1_TGCAGGGTTCTTTGTGAAGCGAGAT | 355 | TGTGTTTTTGAAGGTGGTTTGATAGGGCTGCCATTATAACCCA | Y | C | Y | T | GYSNP0962 |
| GCAAAAGGGACAAATAATCGGTCGTATAATGCAAGGGTA | | AGATGATACAGCCCATCTCCTTACAAACTCGCCAAAA[T/C]TA | | | | | |
| ACAAGGATGGATAGGACATCAAAAACT_NODE_1_length_613_ | | TGGCGAATTGCTACTGTGCATAGAGTCGAAGAGCTAAAATCC | | | | | |
| cov_147.526917 | | ATGATTAGACTGTTACCATTTGTGTCAACAGGAATA | | | | | |
| RAD_kmer_0003300_1_TGCAGGGTTCTTTGTGAAGCGAGAT | 507 | ACAGGAATACTATTTGTGATGGCATATTCACACCAAAGTAGC | M | C | M | A | GYSNP0963 |
| GCAAAAGGGACAAATAATCGGTCGTATAATGCAAGGGTA | | TTCACCATCATGCAAGCTCGAACCATGGACCGTCACAT[A/C]A | | | | | |
| ACAAGGATGGATAGGACATCAAAAACT_NODE_1_length_613_ | | CGAAAACTAGCTCGTTTGAAATACCTCCGGCTAGCATGGCAG | | | | | |
| cov_147.526917 | | TTTTTGATGTCCTATCCATCCTTGTTACCCTTGCATT | | | | | |
| RAD_kmer_0003304_1_TGCAGGTTTTGCCCGGTGGAGATTT | 103 | TCGTTTTTGGCCATCTATGGTGCACAAAACTGTAAACAACTC | Y | C | Y | C | GYSNP0964 |
| CCTAAGAGGGACACACCATTTGATTGGGCTATTGGATATT | | AGATCTCTTATTTACTTGAACAAAAAACTAACAGAAAA[T/C]T | | | | | |
| GGGCTTGTAGCTGGATGATGGGCGAC_NODE_3_length_206_ | | CCACAATCAATAGCTAATCTATCTAACACAACCAAATAGATC | | | | | |
| cov_17.446602 | | ATGAACTGGATGATATATACAAAGAACCCAAAGACTA | | | | | |
| RAD_kmer_0003308_1_TGCAGGCGAGCTAGACGGTGGACG | 106 | AAAGGGAATGGGTAAGGCAAACAAACTAACAAACTCATCAC | C | — | S | C | GYSNP0965 |
| GATATCTTTCGCAATATGGGGGCGAAAAGTATGTTTTTCA | | TAAAACTATGATCCCCAATGCAACATATTTGTTATCGGG[G/C] | | | | | |
| ATTCCATTCTTTGCTTGGTTTATTTAC_NODE_1_length_455_ | | TCACTAATTTCTTCACTCAGTGGAGCAATGGGCCCACGTTGTA | | | | | |
| cov_45.804394 | | AAAAGAATATCAATACGACCCAATAAAATGCCACGTC | | | | | |
| RAD_kmer_0003309_1_TGCAGGTTATATAGATGGGTTCCATAC | 374 | TAATGAATCTTCCCACTTGTTAGTCATCAGATACATGTTCCAT | C | C | T | — | GYSNP0966 |
| ACTATGATTTAAAACTGTTTTCAACATGTTATGCCTGATTC | | AGAAGCATGTACACACCATCATCATACGGTTCTAACT[T/C]GA | | | | | |
| AAACAGTTCAAAACCCAAAAAATCT_NODE_2_length_512_ | | GCACCTTCTTTGCTGCTGCTTCAGATAATTGCAGGTCTCTTTT | | | | | |
| cov_61.591797 | | AATTAAACAAGCATTCAAAACCGACCTAAAAATAA | | | | | |
| RAD_kmer_0003312_1_TGCAGGAAATCCGTATTTGCTGATA | 400 | TCAGAACGCATGTGCCGAGATATTCTTGAAAATTTTTGTGAA | G | — | A | A | GYSNP0967 |
| AGGCTCGTATAAAAGCATAATGTCACTTGAGGTCGGAGTC | | GGTATATTTTTATTATTGTTATAATTCTTAATATAATT[A/G]TT | | | | | |
| CTCAAATATCGTCGTCCATACAGATC_NODE_1_length_493_ | | GTTAATATTATTTATTCGGTACATTTGATCTGTATGGACGACG | | | | | |
| cov_65.125763 | | ATATTTGAGGACTCCGACCTCAAGTGACATTATGC | | | | | |
| RAD_kmer_0003316_1_TGCAGGATCATACAAACCAAGACC | 246 | ATATCTCATTTTTTTGCTGAAAAACATGAACAAACCACACAC | A | A | A | T | GYSNP0968 |
| AATTTCTGATATTACATGATTTACTATTTAGCACAGAAAA | | GTGACTTTGGATATAACCTCAAAGGGAAAGCTATACGA[A/T] | | | | | |
| GGTTGACTCAAGAAAAAGATGATTTCT_NODE_1_length_603_ | | ATGTGCTGAAAGAATTGTAAGAACAACATACCTGCACTGAAG | | | | | |
| cov_130.041458 | | AGATCTATAGCAGAGCAATGGGCAGAAGAAAGGGTGGG | | | | | |
| RAD_kmer_0003318_1_TGCAGGTAATTAAAACAACAATGAT | 186 | TTATAAACATATTAGTTCTGTTTTTGGAATAAAAGATATAATT | C | A | C | A | GYSNP0969 |
| GCGATAAAAACTTAAATATTTCGTACTTATAGGCAAAAAA | | TTTTCGATTGACATCTGCTTTAGTATATTCCTCAGTT[C/A]TTA | | | | | |
| TGATCATTGAGTTCTTATTGCTTGCA_NODE_1_length_553_cov_ | | TTGTTTCTTTCTTCATATGATTGATCATTTAGTTTATAAAATTG | | | | | |
| 86.696205 | | CGTTTTTATCAATAGCCATGTCAAATAGATTGT | | | | | |
| RAD_kmer_0003324_1_TGCAGGCACATGTGATGTGTAAAAG | 115 | ACTTTTATCTAGGGAAAATTACTTTTATACGCTAATACACTAA | W | T | A | A | GYSNP0970 |
| GTGTCTGTGCTGCTGTACCGACTCCCCTACCCCAAGATCT | | TATTATTTTAAAACTTTTGATACTAATTAGATGATAT[A/T]AA | | | | | |
| AGAATTTTATAAACTTCACTCATCAC_NODE_1_length_560_ | | ATGTTATATAATAGACTTTTGTTTTTTTTTATTTTAAGAATAGT | | | | | |
| cov_117.930359 | | ATTATTTTTCTAATACATAATATATTTTTACTTC | | | | | |
| RAD_kmer_0003324_1_TGCAGGCACATGTGATGTGTAAAAG | 204 | TATAATAGACTTTTGTTTTTTTTTATTTTAAGAATAGTATTATT | G | — | S | G | GYSNP0971 |
| GTGTCTGTGCTGCTGTACGGACTCCCCTACCCCAAGATCT | | TTTCTAATACATAATATATTTTTACTTCTTTTCTTT[C/G]TTTGT | | | | | |
| AGAATTTTATAAACTTCACTCATCAC_NODE_1_length_560_ | | TTTTTTTAATCTCAGGCCCTCACTTTTTTTTTGGCCTTGCGCCT | | | | | |
| cov_117.930359 | | AGCGCCTTTGATAACTGTGCTTGATAGTCGG | | | | | |
| RAD_kmer_0003325_1_TGCAGGACACCTCATATTTATTAAA | 392 | AAGAAAACGCTTGAGATAAATACGCATTATAATCTAACAAAG | T | A | W | A | GYSNP0972 |
| TATATACTATATTAACTAACAAAACTAATTAATATCCTAT | | TTTGACATTGGATATTGAATGCGTTAAATGGTTAATTA[A/T]T | | | | | |
| TAAGAAGCAAGACAAACCATATCTGG_NODE_1_length_662_ | | GTAGGTACACCCTGGACAGAGGAGGAACATCGGTTGTTCCTA | | | | | |
| cov_115.453171 | | CTTGGTCTCCAAAAATTAGGCAAAGGAGACTGGCGTG | | | | | |
| RAD_kmer_0003331_1_TGCAGGCCCATGTGGTGGAAATTTG | 392 | TACTTTACCTTTTATTGGTGGCTCATAAGAAACTTTAATAAGT | K | T | G | K | GYSNP0973 |
| TATTTGAAGTCTGGCACTGACCGACGCAACTCCATGGACC | | ATGTTGTTATATCATCCTCAATTAAATAGAAAGTAAG[G/T]CC | | | | | |
| ATGATGCTGTATGATTCTTTGAACCT_NODE_1_length_602_ | | AACCTGCCTCGGCAAGTGTAAAGAGAAAGTAAGGCCAACCT | | | | | |
| cov_126.775749 | | GCCTCGGTAAACTTGGACACAGTATCAACATTGGTGC | | | | | |
| RAD_kmer_0003335_1_TGCAGGTTTCTCAATTCTAAAAGAC | 234 | AGTTTCTAGTCTTTTTGTCACATGTGTTCTAAAGGATGTTCTTT | A | C | C | C | GYSNP0974 |
| CCACATATTTCATGCCACATGCCATCATTAACCTCAACTTC | | ATTTAATTATTAGAATGTAGATTTTGGGGTTAATAT[C/A]TTA | | | | | |
| TCCAGCATTCAACCACTGGTCGTCC_NODE_1_length_592_cov_ | | GCAAACAGCGATCTACGTAGCGGAACAAACGGGTGGTTTCCA | | | | | |
| 80.697632 | | CTTGGTAATTGTGCGCTGAGTGTTGCAGCAAGCGG | | | | | |
| RAD_kmer_0003336_1_TGCAGGCATCTGGTGACAGTTTCCT | 495 | AATACTTCATTGTTAACGTTTGCTGATCTTGGGGATATGGTGT | T | C | C | C | GYSNP0975 |
| GCAATCCATTAGCCTGCAGATTCGTTTCTTTTCGCTCTTTC | | CAACTTTACCACGATCGACACACGATGGGATTTATCG[C/T]GC | | | | | |
| CTATCCCGGGACGTTCCTGTAAATA_NODE_1_length_654_cov_ | | AATTGACATGTATCTTAAGGTCAGTTTTTACTACTAAATTTCA | | | | | |
| 129.600922 | | ATTCTTTTGTTGGGTTTGGCTAATCAAACAACTGA | | | | | |
| RAD_kmer_0003336_1_TGCAGGCATCTGGTGACAGTTTCCT | 585 | ATGTATCTTAAGGTCAGTTTTTACTACTAAATTTCAATTCTTTT | C | T | C | T | GYSNP0976 |
| GCAATCCATTAGCCTGCAGATTCGTTTCTTTTCGCTCTTTC | | GTTGGGTTTGGCTAATCAAACAACTGACTTTATTTT[C/T]GAA | | | | | |
| CTATCCCGGGACGTTCCTGTAAATA_NODE_1_length_654_cov_ | | ATATTTACAGGAACGTCCCGGGATAGGAAAGAGCGAAAAGA | | | | | |
| 129.600922 | | AACGAATCTGCAGGCTAATGGATTGCAGGAAACTGT | | | | | |
| RAD_kmer_0003338_1_TGCAGGAGTAGGATTCTCATACTCT | 197 | ACTAGCTTCCATATGGATGTGTTCTTTTCTACCTTTAGTAATA | A | R | G | A | GYSNP0977 |
| AACAAATCCTCAGACTATCAAAAAATGGGTGACAAATCA | | GTCTTTAATTTAACAGAAGAAAACTGAACATATGACC[G/A]C | | | | | |
| ACAGCGGCAGACAATTATGTGTTCTTG_NODE_1_length_573_ | | ATAACATGGTTGGTGGTCCTGCCATGCAACATTTGTTGTTTGG | | | | | |
| cov_75.003487 | | CACCATATTGTATGTGGGGATGTAAGCCTTTCAACA | | | | | |
| RAD_kmer_0003340_1_TGCAGGTCTTTTAATTTGTACTATTA | 415 | GGATGTTCATCACCAAATGTCTAACCTTGGCTAAATGTGTGA | T | Y | Y | T | GYSNP0978 |
| AAAAAGAAAGTTTTTTTTTTAAACTTCTGTAAAATGGGGA | | CACAGGTTGCAGCCAGTGCTACTGCTAGTAATCCCACA[C/T]C | | | | | |
| TATGAAGTTAACGATCAAATTTGAT_NODE_1_length_685_cov_ | | CAAAGTCAGCAGCGATATAGTCCCTCCTGCTAAACCCAACCT | | | | | |
| 63.693432 | | GATTCTTCTTGCTGAAAAAAAGTAACAATTTAATAGG | | | | | |
| RAD_kmer_0003340_1_TGCAGGTCTTTTAATTTGTACTATTA | 480 | GCTAGTAATCCCACACCCAAAGTCAGCAGCGATATAGTCCCT | A | R | R | A | GYSNP0979 |
| AAAAAGAAAGTTTTTTTTTTAAACTTCTGTAAAATGGGGA | | CCTGCTAAACCCAACCTGATTCTTCTTGCTGAAAAAAA[G/A]T | | | | | |
| TATGAAGTTAACGATCAAATTTGAT_NODE_1_length_685_cov_ | | AACAATTTAATAGGCGTATAAACTATAAAGTAGGAGAAAGG | | | | | |
| 63.693432 | | AAGGCCCGGGGTTCAAGTGACGTATCTTTTTTCCAATA | | | | | |
| RAD_kmer_0003344_1_TGCAGGCAGTTGGAGTCACAGGTTG | 119 | CAAGGTTCTTTGGTTGAGTTCATGGTCAAAGAAACCGAAAAG | T | Y | Y | C | GYSNP0980 |
| CTGCAGAACCACAATTACCATCATTTCCTTCTTTGACTAGC | | GTCTATGCTGAGGTAATTCAAACCACAAATTGAGATCG[T/C]T | | | | | |
| CTAGGGAGAAGGTCTTTAAAGTATA_NODE_1_length_276_cov_ | | ATTATGTAAAGATTATATCATATTATCAACATAAACATAACA | | | | | |
| 53.155796 | | GCCGCTTTTAACAGGTTGGAAGGTACACGAGCCCTGA | | | | | |
| RAD_kmer_0003352_1_TGCAGGCATAATTTTACCGGTTCCC | 410 | TAAGGTGAAAGTACTGTTTTTTTTTTTTAATCATAGATTTTAA | T | T | T | A | GYSNP0981 |
| ACAAGAGTGATTGGAACCACTGGAACTCCAGTTTTCGCAG | | ATATGGAAAATTAAATAAAGGTGTTGTTTATTGTTTC[T/A]TT | | | | | |
| CAATACTGAATGCACCTTTCTACAAA_NODE_1_length_474_ | | GTAGAAAGGTGCATTCAGTATTGCTGCGAAAACTGGAGTTCC | | | | | |
| cov_87.622360 | | AGTGGTTCCAATCACTCTTGTGGGAACCGGTAAAAT | | | | | |
| RAD_kmer_0003361_1_TGCAGGTGTTTATGAGCTTATACCT | 90 | TACATAGGGCTTAGTCTTTTCAATAAAATTTAAGCCTTCCATA | T | A | A | A | GYSNP0982 |
| TATTATAAGGGTGAGAATACAGTTTTTGATGTTTCCCCTCC | | AAATTCTCTTAAGGGCTAAGGCCGGTATCTTCAGCAT[A/T]AT | | | | | |
| CTTTGTCACTGTGACTGTTGAGCAT_NODE_1_length_387_cov_ | | ACACACGCGCGCGCGCATATATGTATGTATACATACACAATG | | | | | |
| 38.330750 | | TATGTGTGTGCGAATGTGCGTATGCATATGTATTAC | | | | | |
| RAD_kmer_0003365_1_TGCAGGCATCACATGTTTACAGCGG | 260 | GATGTAGTAGTATTCCAATCTACCTCTATTTATATTCCTATCT | K | T | K | G | GYSNP0983 |
| ATGGGTGTTGGGTTCGCTATAAACATTTGTGCAACATTGG | | GGCAGCCAATTTTTCCCATTTTTTTCTGAACTATACT[G/T]ATG | | | | | |
| TGGGGTCGTTTGTAGAAATCAAAAGA_NODE_1_length_568_cov_ | | GACCAATGTCACCATTAATGTCCCTGCATACTGTCCGAGTGC | | | | | |
| cov_130.919022 | | AATTGCAATCCAATATAAAGCCATTGCTGTGCTTT | | | | | |
| RAD_kmer_0003365_1_TGCAGGCATCACATGTTTACAGCGG | 497 | CGAATACTGAGGAACCAACCAATACACGCTTATGGGTATTAT | Y | C | Y | T | GYSNP0984 |
| ATGGGTGTTGGGTTCGCTATAAACATTTGTGCAACATTGG | | ATGGGTTGGTTGGTCGATCAGATTATGATCTCTTGCTA[T/C]TT | | | | | |
| TGGGGTCGTTTGTAGAAATCAAAAGA_NODE_1_length_568_ | | GTTTTCTTTTGATTTGTACAAACGACCCGACCAATGTTGCACA | | | | | |
| cov_130.919022 | | AATGTTTATAGCGAACCCAACACCCATCCGCTGTA | | | | | |
| RAD_kmer_0003372_1_TGCAGGCGCTCTGTGTGTGTGTGAG | 133 | CTCCACTACAATACAGGGAGACAACCGAATCAAATTAAGCTT | T | Y | T | Y | GYSNP0985 |
| AGAGTTAGGCAAGAAGATAAAGGGTTACAAACTTACACA | | CATACTCTCATCTCTCATTAGTCATTATCGCCCCCCAT[T/C]TC | | | | | |
| GAGTAATCAAATAGGGCTTATTGAGAG_NODE_1_length_500_ | | CTGTCTGCCTTCGATATTTCAAACGATAGTGCTGGCTGCCTGT | | | | | |
| cov_94.444000 | | CTTTGCTCTCAATAAGCCCTATTTGATTACTCTGT | | | | | |
| RAD_kmer_0003383_1_TGCAGGCACACCCAACCACTCCAGG | 276 | GGAATGTGTGGACTGTCAGCGATTAGGTGAAAATTAATGGAC | A | A | R | G | GYSNP0986 |
| GCAAAGTTCAGTTATAAACACAATAACTTATAAATAATGA | | CGATTAGATGAAAATTACTCGGTGAACCTGTGAATAGC[A/G] | | | | | |
| GTAAATTCCACAAAATCAACACCGCC_NODE_2_length_342_ | | ACTAATCATAGGCTAGGCGTGATTTTTACAACCGTGGTATGG | | | | | |
| cov_36.663742 | | TGTTTAGTTATTACGCATGACGGCATTAGGTCATTTTC | | | | | |
| RAD_kmer_0003388_1_TGCAGGTCCTCCACACGGCTTTTCG | 367 | TACTCTCCACTCACAAAGGTAATCTTTTCATCAATTCCCTCAT | A | T | A | A | GYSNP0987 |
| CCCTATCCTTGAACACCTGGTGGGACCCAGACTTGCATTT | | ACCGTTTTATTACAGTTCCGTTACTCTATTAAATTAA[A/T]TAA | | | | | |
| TGTACCTTTCCCCATTAAAAACAACA_NODE_1_length_618_ | | CTTTGTTAATTTTTTGTGTATTAATTCTATATATCGGTCTATA | | | | | |
| cov_77.352753 | | TTTGTTGACTATAAATCAATTATTCTTAGCTAG | | | | | |
| RAD_kmer_0003392_1_TGCAGGTATGGTCAGGTATGGAACC | 160 | ATGGTTCCATGAGAATAGGCTGCAAGGGATCCACTTGAGCTT | K | G | G | — | GYSNP0988 |
| GGGTACACGATACCCAGTTTCAGTTTTTTTGGGTCCGCTC | | GAGCATATTGCTACTCCTAAACCGAACTTGATTGCTT[G/T]A | | | | | |
| ATACCCCGTTTTTTTGTGCACCTCTA_NODE_1_length_469_cov_ | | TTTTTTTTCATGATCTATGATTGATCTTGGCTCCAATCAATTCA | | | | | |
| 122.234543 | | AGATTGGTTCATACGACTTGAAAAGTTATATAAGA | | | | | |
| RAD_kmer_0003392_1_TGCAGGTATGGTCAGGTATGGAACC | 234 | TTGCTTGATTTTTTTTCATGATCTATGATTGATCTTGGCTCCAA | G | K | K | — | GYSNP0989 |
| GGGTACACGATACCCAGTTTCAGTTTTTTTGGGTCCGCTC | | TCAATTCAAGATTGGTTCATACGACTTGAAAAGTTA[T/G]ATA | | | | | |
| ATACCCCGTTTTTTTGTGCACCTCTA_NODE_1_length_469_cov_ | | AGAATTGGAATTAGGCTGGTCGAGCTTTTATGTTTCAAGCTTG | | | | | |
| 122.234543 | | TTGAATTAAAGCTTGACTTGAATGATTCAAGTCT | | | | | |
| RAD_kmer_0003392_1_TGCAGGTATGGTCAGGTATGGAACC | 354 | AAGCTTGTTGAATTAAAGCTTGACTTGAATGATTCAAGTCTG | S | G | G | — | GYSNP0990 |
| GGGTACACGATACCCAGTTTCAGTTTTTTTGGGTCCGCTC | | GCTTGAGCCCAATAACTTTATTAGATCCAGACTCATT[G/C] | | | | | |
| ATACCCCGTTTTTTTGTGCACCTCTA_NODE_1_length_469_cov_ | | AGCCTTAGGTATTATTGGAAGGTTGTTTAGCAAAGATGGGCA | | | | | |
| 122.234543 | | TCTTAGGTAGAGGTGCACAAAAAAACGGGGTATGAGC | | | | | |
| RAD_kmer_0003394_1_TGCAGGTAGGAATAACCTCGTCTTC | 223 | TAAAATATGGGGGGAGAATCGGTGAGGTGGAAATTCATGGT | A | A | A | C | GYSNP0991 |
| TGCATCTCTAGTCCACAACGACCACTCCAGCTGTACGGCT | | GAACGGGAGTACGTTGGGGCTTGTTGTGAAGCGAGCTTG[A/C] | | | | | |
| GAGATCGGATGAACAGCATGCGCTCT_NODE_1_length_619_ | | AGCGGCTTGATGTTGATTACATTGATTTATACTATGTGCATCG | | | | | |
| cov_154.092087 | | CATCGATACAAAAGTCCCTATCGAAATCACAGTTAGT | | | | | |
| RAD_kmer_0003399_1_TGCAGGTTAAACAAAGTGAATTTAT | 135 | GGAAGGTCAACCAATTTCTGGAGATAATCAACTGATTATTGT | Y | T | Y | Y | GYSNP0992 |
| AAAAACATTTTCAAACCAGCATTATGGGCGATATCTCTTA | | GCTTCTAATGTTCTTAAAATATGCACTGATAAAATTTT[T/C]TG | | | | | |
| ACTACTGTTAATAAAGAAATATTACA_NODE_1_length_644_ | | AGAAGTGGAGAAAATTTCTTGAGATTTGTGCTGTTGAAAAAT | | | | | |
| cov_161.461182 | | ATTAAAACATCAATTAGACATTTTTACTTTTAAGAC | | | | | |
| RAD_kmer_0003399_1_TGCAGGTTAAACAAAGTGAATTTAT | 498 | GCCACTGATTTTGAATTTATCCGTCAACAGACTGTTGTCACTT | R | G | A | A | GYSNP0993 |
| AAAAACATTTTCAAACCAGCATTATGGGCGATATCTCTTA | | CACACTTTACCGGTGTTTGCAGGACTTTAGATAGTTT[A/G]TT | | | | | |
| ACTACTGTTAATAAAGAAATATTACA_NODE_1_length_644_ | | AAGTTTAAAATGATAACTTTGTTTATGTTATGGACCAAGTCAC | | | | | |
| cov_161.461182 | | CAAACATGCAGATGAACGTTTACATAGTGTCTAAC | | | | | |
| RAD_kmer_0003405_1_TGCAGGGAGATATTATGGATGAAAT | 169 | CTACTGTGCACACTTCTGTCTCCTCTGGTTCAGTGACTTCAGT | A | — | A | T | GYSNP0994 |
| ATGATCCAAGGGCTAAAAAGTGGCTCCTGTTAATGGTTCT | | CACCTTATTGTGCTACAAGTGAAGACATACATGTTGG[A/T]CC | | | | | |
| CATTTGAACCTCCCTCTTGTTTGTAT_NODE_1_length_257_cov_ | | TGTTTTGGTATTATAAAATTATACAAACAAGAGGGAGGTTC | | | | | |
| 227.984436 | | AAATGAGAACCATTAACAGGAGCCACTTTTTAGCCC | | | | | |
| RAD_kmer_0003405_1_TGCAGGGAGATATTATGGATGAAAT | 85 | ATCATGATCATGATCATCATTATCAAGTGAACATGGTGG | T | T | C | — | GYSNP0995 |
| ATGATCCAAGGGCTAAAAAGTGGCTCCTGTTAATGGTTCT | | AACATCATCAACATTGTTAATATTGAGTGAGTCTTGAG[C/T]A | | | | | |
| CATTTGAACCTCCCTCTTGTTTGTAT_NODE_5_length_236_cov_ | | GGTGTAGCCTCATGAAGAATAAACTTTGCAGATTGCCTCCTT | | | | | |
| 10.478813 | | CTTTGGAGCCTTTTGGATTTACCCTTGTCATTATCTT | | | | | |
| RAD_kmer_0003407_1_TGCAGGTCCGGAGAGGATTGCTAGG | 539 | GATTTGGTTATCGGTACCTATATTTGACGGCGAGTTGTTGCAA | S | S | C | S | GYSNP0996 |
| CATGTCTGGTAATGAAAGTAGCCTTGCTACAATTCTTGGT | | CATCTAAAGGACACGTAGTGGCCCCTGCAAGGCTTCC[C/G]GC | | | | | |
| GCAAAATTTGCAGCGGCGTTTGTTGC_NODE_1_length_604_ | | AACAAACGCCGCTGCAAATTTTGCACCAAGAATTGTAGCAAG | | | | | |
| cov_165.399002 | | GCTACTTTCATTACCAGACATGCCTAGCAATCCTCT | | | | | |
| RAD_kmer_0003412_1_TGCAGGAATGAAGGTTCTATATTAT | 279 | TATGTAGGTAATTCGGTCTTTGAGATTTGTATGGGGTAGGATA | A | A | R | G | GYSNP0997 |
| ATCCTTGCACTATTTGTCTGATAACTACAATTACCAACAT | | TGTGATATATAATTATGCATAAACATAGATGATGTAT[G/A]AA | | | | | |
| AGAAGCATTGAAGTAATCATCAAGAA_NODE_1_length_567_ | | CCACAGGATTAAAAGCAATTTCCATTATCGAAAAGACTCCAA | | | | | |
| cov_75.410934 | | TTCTATTATACACTTTGGGCCCCTAAATACGTTTAG | | | | | |
| RAD_kmer_0003412_1_TGCAGGAATGAAGGTTCTATATTAT | 405 | TCTATTATACACTTTGGGCCCCTAAATACCTTTAGTCGGCCCT | G | G | G | A | GYSNP0998 |
| ATCCTTGCACTATTTGTCTGATAACTAGAATTACCAACAT | | CCACGTGTACGTAGATTAGGTTAAGCCATTTTTATAG[G/A]AT | | | | | |
| AGAAGCATTGAAGTAATCATCAAGAA_NODE_1_length_567_ | | TAAGGTTTGGAATTTGATGTACTGCAACCCGTTGAGTAATGTT | | | | | |
| cov_75.410934 | | TATTGTCGATGGGTTTGAACTAAATATTGGGTTTG | | | | | |
| RAD_kmer_0003418_1_TGCAGGTACAGAACCATTAGATGAC | 500 | ATGAGAGGATGGGTGGACCGACGCCTAATGTCTCTTCTCAAG | A | A | T | A | GYSNP0999 |
| AAGACATTTAATCCAGGTGAAGAGGACATAGGTGCCTGC | | TTCCTAGTAATGGCGTTTCTTCCAAATTAAATGGTCTT[T/A]CT | | | | | |
| AAATTGGACGTTCCTGCAACAGGGGTG_NODE_1_length_602_ | | TTTGCTGTTAGTGGGACTGGAGCTAAAGATTCTAGCACCCCT | | | | | |
| cov_109.559799 | | GTTGCAGGAACGTCCAATTTGCAGGCACCTATGTCC | | | | | |
| RAD_kmer_0003422_1_TGCAGGTAGATTATGATATTCTCAA | 97 | GATGTGGATGAATCATTAATATACTACGATTTTGGTATGATG | T | T | Y | — | GYSNP1000 |
| GACTAATAACAAATCCAGATAATATATAAGTATATATGTA | | GGGGAGATCAAGTCATTAACAAGAGAAAGATTGATGGA[T/C] | | | | | |
| AAAAGGTACTTTTAAGTGTGAATAAA_NODE_1_length_617_ | | CTTTTTTATGCTGTTTATGAAAAAGATGCAAAAAAGGTTTTAA | | | | | |
| cov_91.215561 | | CTTCCGTAGTTTCCTCGCCTTTCTTATACCATAAAGT | | | | | |
| RAD_kmer_0003425_1_TGCAGGAGGTAAGCTCCTGGATATG | 159 | CGGCAAGATTAGCTTACTTGCAGTTTAGGCCGAAGCGCCTCA | G | G | A | A | GYSNP1001 |
| TTCATATGTCATATTTCTTGAAATCCTACTATCCTTTTTTTT | | AGAGGTCCTTTGGGCTTCTCTACACCTTGCTGTTAACA[A/G]T | | | | | |
| TTATTTATTTTTTATTTTTTTATA_NODE_1_length_604_cov_86.132454 | | AACATTATGTTTTGGGTCAACTAATATACAACTTATATTACGG | | | | | |
| | | TAAAAGTTTTAAAATAGCAGTCAGCAAATTCTCATG | | | | | |
| RAD_kmer_0003425_1_TGCAGGAGGTAAGCTCCTGGATATG | 480 | CTCGTGAATGGATTTATAAATCTTACCTTAGAAATAAGTGGC | T | T | T | G | GYSNP1002 |
| TTCATATGTCATATTTCTTGAAATCCTACTATCCTTTTTTTT | | GGCTTTTTTGGCACAATACCTCCATACTTCTTCTTGAT[T/G]AC | | | | | |
| TTATTTATTTTTTATTTTTTTATA_NODE_1_length_604_cov_86.132454 | | TTCCTCCTAAGAAAGCACAATGTAACAAAAGCAGTGATTATT | | | | | |
| | | ATTTTGACACACTAGTATAAAAAAATAAAAAATAAA | | | | | |
| RAD_kmer_0003429_1_TGCAGGAAGATCTTATTGCTCCCTT | 232 | CTTTTGTTTTCAATCATACCACGATCTCTTTGTTGTTGAAAAT | T | C | Y | — | GYSNP1003 |
| AGAACAGCTTGTCAATCTCTTCTTGACCAACAAGGTCAGT | | ATGAGTTTTCAACATCCTCCATTCGAATCTTTTTCTT[C/T]GGT | | | | | |
| ACATTCATGTTTTTGAAAACCCTAAA_NODE_2_length_409_ | | CGATTATTACTTAACGACTCATTAGGTTCGTTTAGTTTTTCGA | | | | | |
| cov_56.185818 | | CATTGGAACTATATGATTCCATTAATCTCTCCAA | | | | | |
| RAD_kmer_0003435_1_TGCAGGGAAACCGCGTTATAAACA | 370 | ACCGTTTTCGCTCATGATTAGTTGTCTTAACTCTTAACTAGAA | C | Y | Y | Y | GYSNP1004 |
| ATGAAAACAAAATCTCTATCTTCCATATTCTAAGTGCTCA | | TATTCTTGTCAAAGGTATTTGCATTACAGAATGTAAC[T/C]CA | | | | | |
| ATTTCATTATAATTATAAAAATGGTTA_NODE_1_length_642_ | | TGCATGTATTTATAGATGCAAGTCATTAATATATATTTTAAGT | | | | | |
| cov_81.593460 | | TGTTGAAGGCAGGTTCCAAGCAGCTTCAATCTACT | | | | | |
| RAD_kmer_0003435_1_TGCAGGGAAACCGCGTTATAAACA | 515 | GCAGCTTCAATCTACTTTCAAGAATAGATTTTTATGTTTTAAT | G | R | R | R | GYSNP1005 |
| ATGAAAACAAAATCTCTATCTTCCATATTCTAAGTGCTCA | | GTTTGCAACAAGACAATGATCTTGGTTTTGACCATTG[A/G]TA | | | | | |
| ATTTCATTATAATTATAAAAATGGTTA_NODE_1_length_642_ | | GACTTGACATGTGTCCCTTCACTCACTCTGTGTGTTTTCTATTC | | | | | |
| cov_81.593460 | | ATGGGATCTTTGTAATTAACCATTTTTATAATTA | | | | | |
| RAD_kmer_0003437_1_TGCAGGACAGGTTAGGCTACTTGTC | 153 | AATCAGAGTATCAAACAAACCAAAAGTCACGACTAAACAAT | W | W | W | T | GYSNP1006 |
| AAGGATATTTTGATTTTGTTATCAAGAAGCTAAGTATCTA | | CAGAACTCAGAAGTTGTAATCACATTAATATTTTGTGCT[A/T] | | | | | |
| CTGTCATGGCAAACTAAGACGTTAAG_NODE_1_length_617_ | | AACCTCTAAAGTGATGAATTTAAATAAGCAACCCCACTCCTT | | | | | |
| cov_136.529984 | | ATGGTATGTGAAAAAAGATGTTTTTCCTTCTAGTCAAC | | | | | |
| RAD_kmer_0003445_1_TGCAGGAACTTTGACTTTTTCGCGT | 296 | ACTACCTTCCCCATATCTCCAAATAAAATAACACGTTGCAAT | G | C | C | C | GYSNP1007 |
| AGTAACATGTGTGGTATGACATCACGTTTTAACCACATAA | | GAATCTTGTCCAGGATATGGAGATGACTTAAAAGAATA[C/G] | | | | | |
| AAATTTGTTAAAAGATAAATGGAGAT_NODE_1_length_601_ | | CTTCTACTCCAAACAATAGATCCATTCACCAACCTATGACCC | | | | | |
| cov_177.470886 | | ATCCTGTAATCGTACCTGCAGCAGAATGTTAAATTTTT | | | | | |
| RAD_kmer_0003445_1_TGCAGGAACTTTGACTTTTTCGCGT | 448 | TAAATTTTTAAAGAACATATCATTTAAGAAGGAAAACTGATA | A | C | C | C | GYSNP1008 |
| AGTAACATGTGTGGTATGACATCACGTTTTAACCACATAA | | TAAATCGTACATGGTGTTAGGCCACAAATTATTCAAGA[C/A]A | | | | | |
| AAATTTGTTAAAAGATAAATGGAGAT_NODE_1_length_601_ | | CTAGTGTGTATAAAACCAGGATCTCGCCATCCGACAGTACTT | | | | | |
| cov_177.470886 | | GCAGGTGGACCTGCAAGCGAATAAAACTTAATATATT | | | | | |
| RAD_kmer_0003445_1_TGCAGGAACTTTGACTTTTTCGCGT | 504 | TGTTAGGCCACAAATTATTCAAGACACTAGTGTGTATAAAAC | A | G | G | G | GYSNP1009 |
| AGTAACATGTGTGGTATGACATCACGTTTTAACCACATAA | | CAGGATCTCGCCATCCGACAGTACTTGCAGGTGGACCT[G/A]C | | | | | |
| AAATTTGTTAAAAGATAAATGGAGAT_NODE_1_length_601_ | | AAGCGAATAAAACTTAATATATTTATTAAGAATCTCCATTTAT | | | | | |
| cov_177.470886 | | CTTTTAACAAATTTTTATGTGGTTAAAACGTGATGT | | | | | |
| RAD_kmer_0003446_1_TGCAGGCACAGCATAACTTGATCAA | 105 | TCAGAAAAGAAAATAAAAAGAATGATTAAACAATAAAACGT | R | G | G | R | GYSNP1010 |
| AGAAGTTAAAATAGAATCAATCCACACCTTTGTTTCTCTA | | ATACTAACTAAAAACGTATATAAAATAAGCACACGACAA[G/ | | | | | |
| AAACCGTTGAAACTTCAAACGTGCAT_NODE_7_length_323_ | | A]TTTAGGCCAAAACGTAAACCAACAAAAAAAAGTGTTTATG | | | | | |
| cov_40.916409 | | TCCAAATATAACCAACTTGAATTTATAACAATAGATAAAA | | | | | |
| RAD_kmer_0003446_1_TGCAGGCACAGCATAACTTGATCAA | 230 | AATATAACCAACTTGAATTTATAACAATAGATAAAAAAAATA | — | C | T | T | GYSNP1011 |
| AGAAGTTAAAATAGAATCAATCCACACCTTTGTTTCTCTA | | AATACGTAGGTGTCAAAATAAAAATTTTTAAAAGTGTA[T/C]A | | | | | |
| AAACCGTTGAAACTTCAAACGTGCAT_NODE_7_length_323_ | | AAAGTTGAGGGGGTGATGTTGAAAAGAAAAAAGAAACGTAT | | | | | |
| cov_40.916409 | | TGTTCCATTAGAATGAACCGAATTAAAATTGAGGAGGT | | | | | |
| RAD_kmer_0003450_1_TGCAGGCCCAGGCCCATTGCATC | 216 | GTCTGAATGGTTATCTCTTAACCATTCAGACTTAAGGTTGCCT | C | A | A | A | GYSNP1012 |
| CGGTCTTTAAATTCACAAGTTTCATACTTAACTGGGCTTCT | | CTTAACCAATAAGAGGCTATGAACCATTAAGAGGTAG[A/C]C | | | | | |
| CTCACTATGTCTGTGTAATTTCCTG_NODE_3_length_402_cov_ | | TATTAATGACCATTCAGAGGCTACCAAACAGCCCCTATTTCGT | | | | | |
| 43.149254 | | TGCATAGTTGCGAAAAGTATGTCCAACGAGCCCCAAG | | | | | |
| RAD_kmer_0003454_1_TGCAGGATCAAGATAGTTTAGAATC | 535 | TTTTTCTGCATAAAATTTTCGATGCAGCACCTATTGAGTAAAT | G | — | S | G | GYSNP1013 |
| AGAATCATACAAGATCAAGAACTACCCTGTATGACAGAC | | ACTTGATATTATTTGTATTGACGAAGTATTGTACACG[C/G]AC | | | | | |
| ATTGTCCTGATACGACAATTACTTTTT_NODE_1_length_627_ | | TTCACTATTTTCAAAAGGTTGTATTAAAAAGTAATTGTCGTAT | | | | | |
| cov_116.503990 | | CAGGACAATGTCTGTCATACAGGGTAGTTCTTGAT | | | | | |
| RAD_kmer_0003460_1_TGCAGGAGGAAAGAAAAGAAAACA | 170 | AATTAACACGTTACACAATTAACTATAATTCACACAAAATGT | G | R | R | A | GYSNP1014 |
| ATCGGATGTGCCGAATTCCAAAGCCCCAATTGATGACAAA | | CATGAGATACATGCATGATTAGTTTTCAAAAGGATAAT[A/G]C | | | | | |
| CGGGCTAAAAAATTACCCGAGCAGCCT_NODE_1_length_648_ | | ATTGCTAGCCTAAGTTACCTGTCTCTTTCTCCTCTCACCGATT | | | | | |
| cov_79.841049 | | GAAAGTCAACAGCAACAGAAGTATAGTAACGCTAAA | | | | | |
| RAD_kmer_0003460_1_TGCAGGAGGAAAGAAAAGAAAACA | 506 | GAACCTTTACCAGATATTGAGCCATTTTACTGAACCGAAACA | K | G | K | G | GYSNP1015 |
| ATCGGATGTGCCGAATTCCAAAGCCCCAATTGATGACAAA | | AAAACTTTGACCGGTGGCTCCTCAATGACATAATTAGG[G/T]T | | | | | |
| CGGGCTAAAAAATTACCCGAGCAGCCT_NODE_1_length_648_ | | ATCAAACTACTTTTGAACTGTCATTGATGCCATCATTCCCGTC | | | | | |
| cov_79.841049 | | ATCAAGCATAACGATGACATCACCATCGTTTTCAGG | | | | | |
| RAD_kmer_0003463_1_TGCAGGTTGCTTGGGACACCAACTG | 216 | AACACACATACACAAAGCACTAAAATTGTTAAACAAAACAC | C | T | C | C | GYSNP1016 |
| AAGAGCAGTGGCCAGGGGTGAGGTCTCTAAACAACTGGC | | ATAGTAAAATCACCAAAGTGATGATGAAATTTTTTTAAT[C/T] | | | | | |
| ATGCCTATCCAAGGTGGGTACCTCAAA_NODE_1_length_520_ | | AGACAGCAGGTGAAGCTAAGCTTTAGAACTGTGATTTGTCAA | | | | | |
| cov_88.259613 | | GACTATCAAAATAAGGATGATCCATAGCAGCTTTGGCT | | | | | |
| RAD_kmer_0003466_1_TGCAGGATTGTTTTACATTAAACAC | 371 | AAGCTATAAAAATTGTCCAAATTGTCCTTAACTCCTTATGTGA | A | T | T | T | GYSNP1017 |
| ACTTTTGTTTCCCTGGGTTTGTAAAATATTATGAAATTCCT | | CATAATTACACTGTATGTCCCTGCTTTTACTGTTCCT[T/A]TAT | | | | | |
| GATGTGACATAATTACACTGCATGT_NODE_1_length_501_cov_ | | GGTTTGGGTCCCTAGTCATCTGAGTAAAATGACTAATCCATA | | | | | |
| 119.167664 | | ACAGAACAGGAAAAGAAAGGACATGCAGTGTAATT | | | | | |
| RAD_kmer_0003466_1_TGCAGGATTGTTTTACATTAAACAC | 432 | CCCTGCTTTTACTGTTCCTTTATGGTTTGGGTCCCTAGTCATCT | C | A | A | A | GYSNP1018 |
| ACTTTTGTTTCCCTGGGTTTGTAAAATATTATGAAATTCCT | | GAGTAAAATGACTAATCCATAACAGAACAGGAAAAG[A/C]AA | | | | | |
| GATGTGACATAATTACACTGCATGT_NODE_1_length_501_cov_ | | GGACATGCAGTGTAATTATGTCACATCAGGAATTTCATAATA | | | | | |
| 119.167664 | | TTTTACAAACCCAGGGAAACAAAAGTGTGTTTAATG | | | | | |
| RAD_kmer_0003467_1_TGCAGGCGCAAGGGGCGTTGCCTCC | 336 | AACGTTTTTATGACTATTTTTCTTTTTTTGATCGTTTTTTTTTTG | G | K | G | — | GYSNP1019 |
| TTGGAACCCCTGATGTATCTTGGTGTCGGATGTCTTATTAG | | TTTTTATACAAGATTTTTCGGCGTTGGTGATCAGC[G/T]GCCGT | | | | | |
| TTTTGAACGAGCATGTACGTAACAC_NODE_1_length_414_cov_ | | AGTGTGACATTGGTCTCATAGATTTTCCGTTAAAGGATTATCT | | | | | |
| 34.137680 | | TGATTTTGGCTAGAGCTCCATTATTGTAAAGG | | | | | |
| RAD_kmer_0003469_1_TGCAGGTTTGACCATCTTTTGCTCG | 582 | GAAAATTCCATTATAGCTAACAAAATTCATCCAACTTTTAGTC | — | T | T | C | GYSNP1020 |
| AATTTCTTAATATTCGTTTATTATTAAGTATGAACTTTTGT | | AAAACGTCTATGATCCGTTCTTCACGGCCAATTAATT[T/C]AA | | | | | |
| TGTGAATACACTAGTTACTTAAATT_NODE_2_length_642_cov_ | | GTAACTAGTGTATTCACAACAAAAGTTCATACTTAATAATAA | | | | | |
| 90.517136 | | ACGAATATTAAGAAATTCGAGCAAAAGATGGTCAAA | | | | | |
| RAD_kmer_0003474_1_TGCAGGCAGCCTTAACTTCTGGCAG | 285 | GAGCACTTTATAGGGACTTATTGGGGTGCGGTCGGGACATCA | Y | G | Y | C | GYSNP1021 |
| TTAAACCATGAATCTCCTGTTTCAGCAAGAACTGCAGTGT | | TTTTGTTCCGAAATTGTTGAGTCTGCCGACGCTTATCT[C/T]TT | | | | | |
| TCTCATTGAGCATTTTCTGTATATGT_NODE_1_length_622_cov_ | | TGCTGGGCCCATATTCAACGACTATAGTTCGGTCGGCTACTC | | | | | |
| 157.657562 | | ATTGTTGCTCAAGAAAGAAAAAGCCATCATTGTGCA | | | | | |
| RAD_kmer_0003484_1_TGCAGGTAATCATCGATCGAAAAAT | 391 | GAAATAAGAGGTATGAGAATCAGCAAAACAACAACGGCTAA | C | — | Y | C | GYSNP1022 |
| GAGTACTGCTTTATATTTTTATATTACATCTTATCATATAG | | ATCCTGACAAAAGAATTAATAAATAATAAACGTGTTAAA[T/C] | | | | | |
| CTTTACATGTTGAACCTGTATTGCA_NODE_1_length_611_cov_ | | GCAATGTTTTCTTGGAACTTTTTAAAAATCATATTATATCCAC | | | | | |
| 113.842880 | | ACAAGCACCCATAAACTTATATTCATGATTGGATGTA | | | | | |
| RAD_kmer_0003485_1_TGCAGGGACAAAGGGAGGATCGCT | 431 | TTTATTTAGAAACTCTGGTACGCTTGAACCCTCATAATATAAA | Y | Y | T | T | GYSNP1023 |
| CTTTCGCAATACATGAAAACAATCAACCTGAAAAGCAAG | | CTTTCAATTTTTTGTGTTACCCAAAAATATTTTGAAG[T/C]TAT | | | | | |
| ATCAAAGGGTTGACTACTGCATCAAATC_NODE_1_length_510_ | | AAAGCCCTCTTGATTTGATGCAGTAGTCAACCCTTTGATCTTG | | | | | |
| cov_112.747055 | | CTTTTCAGGTTGATTGTTTTCATGTATTGCGAAA | | | | | |
| RAD_kmer_0003493_1_TGCAGGCTACCATCAAGTCTAACCA | 276 | TCATTAAGCACGTGATTGGTTATCGTAACCAGATCATTAAAT | C | T | T | T | GYSNP1024 |
| GCTTATCATCCGTTCACAGAAACGTGAGGAAACCACAACT | | ACGTGACGGGTATTGTAAGTAGCAGAGTGCCTTAAAAG[T/C]T | | | | | |
| GCTGACGCAGCAATCTCTCGCCGTTT_NODE_1_length_559_ | | AAAACATCTAATATATATTTTTAAACTTTGAATTCTAGTTATT | | | | | |
| cov_157.296951 | | TCCCTCACCAAAAGTGAGGGCGTATTGAAAGTAGAT | | | | | |
| RAD_kmer_0003493_1_TGCAGGCTACCATCAAGTCTAACCA | 385 | TTGAATTCTAGTTATTTCCCTCACCAAAAGTGAGGGCGTATTG | C | A | C | C | GYSNP1025 |
| GCTTATCATCCGTTCACAGAAACGTGAGGAAACCACAACT | | AAAGTAGATAATTAAATATGTGACGGGGTATTGTAAC[C/A]A | | | | | |
| GCTGACGCAGCAATCTCTCGCCGTTT_NODE_1_length_559_ | | GCAGAGTGACCTTGAAAATAAATAGAGTTACCTGCTTCACCA | | | | | |
| cov_157.296951 | | TAAGCGGCATCTGCGGGAGAAACCTTGGTGCCAACAG | | | | | |
| RAD_kmer_0003495_1_TGCAGGTATCTGTTTGAGTTTTGATC | 237 | GACCCCTTGTTTGTGCAAACTACAACAAAATGGACCTTTAGC | G | — | G | R | GYSNP1026 |
| ACGTGATACTGTCAACAATTACAAACCATTTTATGAAGCA | | GATGACAATTGTCGCCGCTATTGCCTAGAATTGTCGTC[G/A]C | | | | | |
| TAAAATTTTCTAAAGAAAAGGTCAT_NODE_1_length_569_cov_ | | TAAACATTTAGCGGCGACATATCTCCGCTAAAGGCCGTCGCC | | | | | |
| 80.434097 | | GCTAAAAGTTTGTCACTAAAGGCCAAGCTGTCACCGC | | | | | |
| RAD_kmer_0003500_1_TGCAGGAACATTTGGGTATATTGAT | 110 | ACAAGTTCACTTATTTTGTTATTCTCATAGTACATTCGTACCT | T | T | T | C | GYSNP1027 |
| CCGATGTACCAAGAGACAGGGGTACTAACGAAAGAGTCA | | GTCCTACTAAAGGCTGGTGATTTTGGTTGCCATAGCA[T/C]AA | | | | | |
| GATGTCTACTCTTTTGGCGTAGTGTTG_NODE_1_length_198_ | | CCTCCCACATAACACTTCAAACAACACTACGCCAAAAGAGTA | | | | | |
| cov_331.338379 | | GACATCTGACTCTTTCGTTAGTACCCCTGTCTCTTG | | | | | |
| RAD_kmer_0003500_1_TGCAGGAACATTTGGGTATATTGAT | 144 | TTTTCGGAATGAAAACAGGGGATTGTTATTCGGATGTCTTCTT | A | G | G | G | GYSNP1028 |
| CCGATGTACCAAGAGACAGGGGTACTAACGAAAGAGTCA | | CTTCGTGAACGGTGGAATGATTGGGAACCAATGCTCT[G/A]AT | | | | | |
| GATGTCTACTCTTTTGGCGTAGTGTTG_NODE_2_length_361_ | | GCCAATTGTGAGATCACAGGATCGATGAGGGTAAAGGATTTG | | | | | |
| cov_34.817173 | | AGAGAGAATTCTTATAAAACAAAGATTCAATACATT | | | | | |
| RAD_kmer_0003500_1_TGCAGGAACATTTGGGTATATTGAT | 289 | AAAGATTCAATACATTTACAAATGATACAATATGTTTGGTAT | C | T | T | T | GYSNP1029 |
| CCGATGTACCAAGAGACAGGGGTACTAACGAAAGAGTCA | | TTATACAAGTGAAAGGTTGTGTCTCTTGGACATAACCG[T/C]C | | | | | |
| GATGTCTACTCTTTTGGCGTAGTGTTG_NODE_2_length_361_ | | GTGATGGTTGGTTGTATAACCGCCACTAACTAACCAACTAAT | | | | | |
| cov_34.817173 | | ATATACTTAGGATAAGTATCTAACTTAGGATAAAAGG | | | | | |
| RAD_kmer_0003503_1_TGCAGGAGATCATATAATGTTCTGA | 136 | GACAGATTGCTCACCTCCATATCAATCCTAGGATAAGTATAA | T | T | Y | C | GYSNP1030 |
| GTGACTACTTTGAGAGGAAGTTACTTTGTAGCCAACAGTT | | GAAAAGACAATCTCCTCAATGCACCTACGAAGTCCATG[T/C]G | | | | | |
| ACTTTCAGATGAGAGATATGAGAATA_NODE_2_length_353_ | | TCTGACAAGTGGAAGGAAAACAATTCAAAGGATTACATAGA | | | | | |
| cov_48.977337 | | TGCATATAGGACTGAATCAAATTCATTGACATTTATCA | | | | | |
| RAD_kmer_0003507_1_TGCAGGTGGCCTATCTTAGCTCTTCT | 238 | GCCATAACCGGTTAGAGTTTCAAAATAACCAATGGTTTGTAG | T | A | W | A | GYSNP1031 |
| TGGGCCCACTTAATCTTTTCCTAGGACCAAAACTTTTTTTT | | CCGGTTAGTGTATTTTGGGGGAGGAACCGGTTATTTTT[A/T]A | | | | | |
| TCTTTAGGTATTCAAAGAATATTC_NODE_1_length_529_cov_ | | CCGATGTATCGGTTAACCGGGAAAAAAACCAAACAATTGAA | | | | | |
| 82.160683 | | GAAAAAAAAAAACTGAAAATAACACGTTAATTAACCGA | | | | | |
| RAD_kmer_0003510_1_TGCAGGCAATTGGGGACGGTGTCGC | 252 | ACATTCAGATTATTATCGTAATGATATTACGTTTTGTAATCAT | A | C | A | — | GYSNP1032 |
| CCTTATGGGGGTGGTTCAAATGGTGATTTTTGGAGACGGT | | AAATAATGCATCAACTATTTAAGCAAAAACAATATTA[A/C]A | | | | | |
| GTTGCCCTTACAGGGGCGGTTCAAAT_NODE_1_length_606_ | | ACAGAGAAGAAAGGGATTGCATGTCAAACCAAAACCTGCCT | | | | | |
| cov_100.033005 | | TATTTGGACTCGTCCTACAATATTTGACATTTCAAGAC | | | | | |
| RAD_kmer_0003511_1_TGCAGGCCAGATCATTAGACAATTA | 89 | ACATGCTGAACAACTAACGCGACATTCGCTTTAATGTATTAA | C | T | Y | T | GYSNP1033 |
| GGCAATTATGTTATTTAAGAAACATCATACAAATTGAAGT | | CCTTTCGTTTTAAAATGTATAAAATTATTATACTATTG[T/C]TC | | | | | |
| GAACAGAGGGACAATCAACCTGAACA_NODE_1_length_481_ | | ACTGAAGTTGTATGGACGAAAGGTGACTCAATTTCTAAAAGA | | | | | |
| cov_198.066528 | | ATTTGGGAGCATTGAATCAGGGCAACTCATAGCTTA | | | | | |
| RAD_kmer_0003514_1_TGCAGGATCGCTCACTGTCTTCTTC | 206 | CATGGGAAATGGGTTCTAACATAAAACAAGCATTGGGCTACG | A | T | T | T | GYSNP1034 |
| GTGCTCGCCATATTGCTTACTTGCGCTGTTTATGATTGTTT | | AGTGGGGTTATGAGGTCCATATGGAGCGGGCGGAAGGG[T/A] | | | | | |
| GATCATCCCCTTTTGGAAGAAATGG_NODE_1_length_626_cov_ | | CTCAACCTGTCGGATCATGTGGAAAACAACCATTGCATGTTT | | | | | |
| 137.632584 | | TGCTAATTAGCTACGAGACCCGAATTCCATCTATTAGG | | | | | |
| RAD_kmer_0003516_1_TGCAGGTCAATATTGTTAGTTTACA | 262 | GCGACCCAGTCTGCTAACAAGTAAGCACACCATATGAATATT | R | A | R | A | GYSNP1035 |
| TCTAACTTCCAACTCTTTCATCACCAGCTTCACTCCAACAT | | CTGATCCTTCTTTTGGCGATATACTTTCTTCGGTGACC[A/G]CT | | | | | |
| ATTCATCTTTTACAGTCCAGAAATT_NODE_1_length_573_cov_ | | GTAGATTAGTGAAGTTTGTAGAGTGAGGCTGAGAAGAACCA | | | | | |
| 117.916229 | | ATGCTCTAAGCTCCCATTTGTTCCATTGTTTCCTCAA | | | | | |
| RAD_kmer_0003517_1_TGCAGGACCGCGGCCAAAGCCAATT | 110 | AATAAAATGGTGTGTATTGGTTGCTGTAGGTTATTAGTATGTT | C | C | C | A | GYSNP1036 |
| CATTTTCATAATCACCTCCAGTTACAAAGAAATGCAAGTC | | TGGGAACTATTGTATTGCTGCTAACTGCTATTCATAG[C/A]TT | | | | | |
| TTGTATGAACTTATACACCACAACAT_NODE_1_length_584_ | | GTTGATAGGCAGTTATAAACTGAAATAAAACTTAGAATTATA | | | | | |
| cov_181.839035 | | TTCCTGACTGAGTGTGTTATAGGATGCTTGTCCTAC | | | | | |
| RAD_kmer_0003517_1_TGCAGGACCGCGGCCAAAGCCAATT | 362 | GCTTTTGAAAGGTCCATCTTTACTAAAACACAGAAGACTAAT | C | C | C | T | GYSNP1037 |
| CATTTTCATAATCACCTCCAGTTACAAAGAAATGCAAGTC | | GCAAGGACTGAAGGTATTATTATAATTGACTTTTATCT[C/T]T | | | | | |
| TTGTATGAACTTATACACCACAACAT_NODE_1_length_584_ | | CACACTTACTGCTAAGGTATATATCGAATACCTTATTATGAA | | | | | |
| cov_181.839035 | | GATAGTTGTGCCTGCAGCTGGAATGCTTTCAAAGATA | | | | | |
| RAD_kmer_0003525_1_TGCAGGAGAGTAAAATGAATTCTTT | 519 | TCACCCAGAAGTACGTGCCCTCGGGTTTCTTCCCAAAGAGGG | T | G | K | K | GYSNP1038 |
| AGCCTTCAACACATCAACCCATACCATGCCTGATAATGAT | | CCATGGTGTATATGTCGCAAGGTATGGCTTTGACCCGT[T/G]T | | | | | |
| GCTGGCTGTGCAAGTCTAGACTGCCA_NODE_1_length_594_ | | TTTGCAAGATGGCAGTCTAGACTTGCACAGCCAGCATCATTA | | | | | |
| cov_161.538727 | | TCAGGCATGGTATGGGTTGATGTGTTGAAGGCTAAAG | | | | | |
| RAD_kmer_0003527_1_TGCAGGCGATTTTAGTTTACTTATTG | 432 | AAGGATGAAATCATTCAAATCATGACACTGACAAAGATCTAA | T | — | G | G | GYSNP1039 |
| GTGACTGGTACAAGTCCAACCATAAGGTGAGGATCATGTT | | TAATAATTTATATCATGTTTGACTTTCAAGAGTCAAAA[G/T]T | | | | | |
| CAAAGTCATAGTCAAATTAATCTTA_NODE_1_length_632_cov_ | | ATTGGTTTCTATCCTCAAAATCAACAAGATTTATAGAAAAAA | | | | | |
| 125.781647 | | TTTCAAAACCTTTACAACATTTAACAAAACAAAATCA | | | | | |
| RAD_kmer_0003527_1_TGCAGGCGATTTTAGTTTACTTATTG | 487 | CATGTTTGACTTTCAAGAGTCAAAAGTATTGGTTTCTATCCTC | T | — | Y | C | GYSNP1040 |
| GTGAGTGGTACAAGTCCAACCATAAGGTGAGGATCATGTT | | AAAATCAACAAGATTTATAGAAAAAATTTGAAAACCT[T/C]TA | | | | | |
| CAAAGTCATAGTCAAATTAATCTTA_NODE_1_length_632_cov_ | | CAACATTTAACAAAACAAAATCATTTACTTGATCTCAAAATC | | | | | |
| 125.781647 | | CAAAAACAATAACTTCAAAATATTATATGAAGACTC | | | | | |
| RAD_kmer_0003528_1_TGCAGGTTTGATTTCAATAACTTGT | 525 | CTTGCAGCATAGCTCTTGGTTAAACCTATTTACATTCAGATAC | G | G | S | S | GYSNP1041 |
| AAGTACAGTATTCAAGAAATACATATATGTATATATGATT | | TAAACCAATGGATTTGCCTTCAACATGGCTCTCACAA[G/C]AA | | | | | |
| TAGTTTGTGCATAATATATGCnTAC_NODE_1_length_596_ | | GTAAGTAAAGCATATATTATGCACAAACTAAATCATATATAC | | | | | |
| cov_74.407715 | | ATATATGTATTTCTTGAATACTGTACTTACAAGTTA | | | | | |
| RAD_kmer_0003535_1_TGCAGGAACAAGGGCCCATCCCAAT | 306 | TCAGGTGMTTGTTCAACCCGAACACGATCCATAATTCCCTA | G | G | A | G | GYSNP1042 |
| CGCTCATTCACGTGTAGGTTTTATGGACGCCAGCCTAAGA | | TTTTTATTCGTGTCAAAAACATCAACCCTAAGCCGCAC[A/G]G | | | | | |
| ATAATGTCAACCTGGCTACTAATTTC_NODE_length_619_ | | ACTTAGAATTGTATAACCTGAAACAATTTGGTGAGTTGTAAT | | | | | |
| cov_103.922455 | | CAAGTTGTAAATGTGTTAATGAAGTTGTGGGTTGAAA | | | | | |
| RAD_kmer_0003535_1_TGCAGGAACAAGGGCCCATCCCAAT | 404 | CCTGAAACAATTTGGTGAGTTGTAATCAAGTTGTAAATGTGT | A | A | G | A | GYSNP1043 |
| CGCTCATTCACGTGTAGGTTTTATGGACGCCAGCCTAAGA | | TAATGAAGTTGTGGGTTGAAAATGGGTTAAGCATGTTA[G/A]C | | | | | |
| ATAATGTCAACCTGGCTACTAATTTC_NODE_length_619_ | | GGGTTGACCTGTTTAACTAAACAGGTTGGTGGGTCGACCTAT | | | | | |
| cov_103.922455 | | TTTGTTAAACGGGCTATATATGTCAACCCTAACACGA | | | | | |
| RAD_kmer_0003537_1_TGCAGGACATAAAGAAAGAGTTGC | 130 | TTAAATGAGTTTCATTAATTAATAGATTTTGTAACGGTCAAAT | W | A | A | W | GYSNP1044 |
| AATTTTCAAGGGGCGTGCCAAAAAAATTATATCTGAAAAC | | TGATAAATTTCAAATGGTTATTCTTGTGATTTTCCTT[A/T]ATT | | | | | |
| TTGATTTATACTGAAAACTTAACAACT_NODE_length_416_ | | ATATGTATGCATCTTTTATGTATATTTGCAGACTCAAGTATGT | | | | | |
| cov_51.737980 | | ATGTATACATGTACCGTACTTTACACATGAACAC | | | | | |
| RAD_kmer_0003537_1_TGCAGGACATAAAGAAAGAGTTGC | 198 | GTGATTTTCCTTAATTATATGTATGCATCTTTTATGTATATTTG | Y | T | T | Y | GYSNP1045 |
| AATTTTCAAGGGGCGTGCCAAAAAAATTATATCTGAAAAC | | CAGACTCGTATGTATGTATACATGTACCGTACTT[T/C]ACA | | | | | |
| TTGATTTATACTGAAAACTTAACAACT_NODE_1_length_416_ | | CATGAACACAAACTAGACATAAGAATATGGTAATACTATAAT | | | | | |
| cov_51.737980 | | GTATGGAATCTCTTATAATAATTAGAATTTTTTGT | | | | | |
| RAD_kmer_0003550_1_TGCAGGCTCATTTGAACACATAGAT | 241 | ACAAGATCTTAAAAGTACATCCATCCTCAACTATATGAATA | G | G | R | — | GYSNP1046 |
| AATAGCGCAAAATAAAACGGGTCAAAAGTAGCCAAACAT | | TAGTCGGCAGCAGGAAGAAGAGATGGTGATGATTTACT[G/A] | | | | | |
| ATACTCTTTAAGTGTTTACAAATTCAT_NODE_2_length_340_ | | AACATTAAAGATGCTAATTGTTGGGTTCAGATTGATGTTGTTA | | | | | |
| cov_49.994116 | | TCATAAGACAACAATAAATTTAAATTATTGGGTATTC | | | | | |
| RAD_kmer_0003552_1_TGCAGGTTGTGAATGGTAGGAATGT | 511 | TTCAGATTCCTAGAAGGAAGAAAGTGCACATGCTTAGGTTTC | T | T | C | — | GYSNP1047 |
| GAAATGATATTAATTAAGTCGTTAGAATTGTGTTTTTTCTT | | AACAGCAATTTCTATAAATAAGCAATTCCAACAGGAAA[C/T] | | | | | |
| ATGCATGGCTATTTAAGTCAGCCTC_NODE_1_length_607_cov_ | | AGAGATTAATATGTCGTATACTAAGAGATGAGAGGCTGACTT | | | | | |
| 3.871498 | | AAATAGCCATGCATAAGAAAAAACACAATTCTAACGAC | | | | | |
| RAD_kmer_0003557_1_TGCAGGTCAAACGAAATCTTTAAAC | 173 | ACTTGTCTCTTCAAGCCAGTAATGATAATATTGACTTATGTTG | A | G | R | R | GYSNP1048 |
| AAAATGGGGTTTGAAGCATAAAACAGAAATCAAACCGGA | | GTATTTATCCAAGCTTCATGATCAAATATGTTCTCCC[G/A]TA | | | | | |
| GTTGGTTACCTTTCTACGCAACTAGAA_NODE_1_length_572_ | | GGACCAAGCGCGTTCGTTTGCATTGACATTTTTTTrrATATAT | | | | | |
| cov_92.022728 | | TAATGGATGAGAAATGTTCAAGTAGCTTTTGAACC | | | | | |
| RAD_kmer_0003557_1_TGCAGGTCAAACGAAATCTTTAAAC | 272 | TTTGCATTGACATTTTTTTTTATATATTAATGGATGAGAAATG | — | T | T | Y | GYSNP1049 |
| AAAATGGGGTTTGAAGCATAAAACAGAAATCAAACCGGA | | TTCAAGTAGCTTTGAACCATTTTGACATTACAAGTT[T/C]ATC | | | | | |
| GTTGGTTACCTTTCTACGCAACTAGAA_NODE_1_length_572_ | | CCCTCCTTTAGAATTTTCTTCTGCTCCATTTACTTTATCATTCA | | | | | |
| cov_92.022728 | | TATTAATGGTACATAAAGGGGAAAGATCCGTTT | | | | | |
| RAD_kmer_0003561_1_TGCAGGATCTGTACATATCTCAAAC | 383 | AGATGCTATTCTTGAACCTGAGGGCCCTAAGGTACTCTATCA | C | T | C | C | GYSNP1050 |
| GAAGAACCAATCATTTAAACATATAATCATTCTAAATAAA | | ATTTGGTATGTTTTGATCTTATTATGGTTGATTTGTAA[C/T]TA | | | | | |
| AACAGATATTTGAGAGATTTGTTGCA_NODE_2_length_441_ | | AATGAHAATGATATTATATGCAGAAAATGGAAATTGTGAAA | | | | | |
| cov_3.609977 | | CATGACTTCCAAGTTGTTTTTTTTTTTTTTTTTTTT | | | | | |
| RAD_kmer_0003564_1_TGCAGGCTACCATCAAGCCTAACCA | 258 | CATTCGCTAAAATCACACAAATCCACATTTCAATTCACATCAT | T | — | C | T | GYSNP1051 |
| GCTTATCATCCGTTCACAGAAACGTGAGGAAACCACAACT | | TAAGCACGTGATTGGTTATCGTAACCAGATCATTAAA[C/T]AC | | | | | |
| GCTGACGCAGCAATCTCTCGCCGTTT_NODE_1_length_571_ | | GTGACGGGTATTGTAAGTAGCAGAGTGCCTTAAAAGTTAAAA | | | | | |
| cov_115.099823 | | CATCTAATATATATTTTTAAACTTTGAGTTCTAGTT | | | | | |
| RAD_kmer_0003567_1_TGCAGGTAGGGGTCCTCTATACCAA | 156 | ACAAAATAAGTGTTATGTCTTTTGAACGCAGATTACAAGAGC | K | T | T | K | GYSNP1052 |
| GGACCAGGAGGTGCATTCATTGGTGGGCCGCGCCAGGCA | | GGAACTGTTGATACTTGGACAAGAGATGGTTCTCCAAA[T/G]T | | | | | |
| TCATAATGTTGAGGGGGAACATTGGAG_NODE_length_283_ | | TTGAAGATGGGGTTCGCCCTAATGCTGACAAGTGGCAGGGGG | | | | | |
| cov_217.427567 | | ACCCACAGCAATACTTCAACTCCAATGTTCCCCCTCA | | | | | |
| RAD_kmer_0003568_1_TGCAGGAAAAATTCACATTTTTCGG | 147 | TCATGAGAATACATTGGATCTTGGACAGCGCATCACCAGGTA | — | T | C | T | GYSNP1053 |
| TCACATTTACACCTTTTTAAAGCATAAACAAGAAAATAAA | | TGCTCATGTGCTTGACCAATTGGGCTATCGCATGTCTG[C/T]T | | | | | |
| AAACGGAGTCAAACAAAAATATGTTA_NODE_1_length_602_ | | AGATCAATATACGGAGATAGTAGTTTATTATACAAACCTCAA | | | | | |
| cov_107.320595 | | TAGAATCATTTTTTTATTCTCTTCTCGGGGAAGAGGG | | | | | |
| RAD_kmer_0003568_1_TGCAGGAAAAATTCACATTTTTCGG | 265 | CCTCAATAGAATCATTTTTTTATTCTCTTCTCGGGGAAGAGGG | T | T | A | T | GYSNP1054 |
| TCACATTTACACCTTTTTAAAGCATAAACAAGAAAATAAA | | GACATCTACACATAGTAATAAATAATAATCATATTTTA[A/T]AA | | | | | |
| AAACGGAGTCAAACAAAAATATGTTA_NODE_1_length_602_ | | GTTAAAAGACCTCATACTTTACTGTCTTTCTGAAAATTTTCTG | | | | | |
| cov_107.320595 | | GAGTGTTAAATTGATEATACTCTTTTAACTCGCAA | | | | | |
| RAD_kmer_0003568_1_TGCAGGAAAAATTCACATTTTTCGG | 328 | AATAATAATCATATTTAAAAGTTAAAAGACCTCATACTTTAC | — | C | T | C | GYSNP1055 |
| TCACATTTACACCTTTTTAAAGCATAAACAAGAAAATAAA | | TGTCTTTCTGAAAATTTTCTGGAGTTGTTAAATTGATTA[T/C]AC | | | | | |
| AAACGGAGTCAAACAAAAATATGTTA_NODE_1_length_602_ | | TCTTTTAACTCGCAAGATATTTGTTACAGCATAGCAGTTAAAG | | | | | |
| cov_107.320595 | | TGAGCTTATTATTCAACTGTTTAGTTGAACTAGAG | | | | | |
| RAD_kmer_0003570_1_TGCAGGTAAAGTGATGGTCTACGTT | 345 | GCAACAAAATCTTCATTATCAATATTTGTTCGGCTAATGCAG | S | G | S | G | GYSNP1056 |
| CAAGGTCCTGCTCCAGGAATCGGTTTTATGGTTACCAGAT | | GATCCAATTGGGAAACTGTTGTGTATTTGTTTGATTTT[C/G]AC | | | | | |
| TTCAAATCGTTGCTGTTGATCACCAG_NODE_3_length_425_ | | CGTTGCTCCATGCATGCTTCTCGAGTCAGAGGTTGAGAATTTC | | | | | |
| cov_35.689411 | | AGAGTAATGTCCCGCTTACGAATCTGCAAGTTAGA | | | | | |
| RAD_kmer_0003572_1_TGCAGGATTATTATTAGTTATTATTG | 126 | AAATTTTTAAGCTTCAAGTATATAGGAGTTGCAAGATACAAT | C | M | M | C | GYSNP1057 |
| TTTGTTCTTATTGAAAAAAGTGTTTTATTTGAATAAATTGT | | GTATTATTTGAATGCGTCGGTTTATTTAAAAAAAAAAAA[C/A]T | | | | | |
| AGGTTCCAGCATCCAAAATCAGCC_NODE_2_length_454_cov_ | | CAAAATTATGTTAAAATTGTGGACAAAAAGTGTTTGGGTTTG | | | | | |
| 71.579292 | | CACACAAAACTACATGTTACCCACGTGCTTTCTTTTG | | | | | |
| RAD_kmer_0003578_1_TGCAGGAAGTTCATTCAAATCGCAA | 363 | TACAGTTGGTAGCTAAAGTCAGGAATAAATGTAATGTTAGTT | M | M | A | M | GYSNP1058 |
| CCTTGCAAAGGTAGTTCTATATCTTTCAATGGCTTTGAGCT | | TCTATTTTGTGGAGCTTGCCTTTCTGATATGTGGATCT[A/C]AC | | | | | |
| CCCGCCACCCTCTGTCTGCACAGGT_NODE_length_625_cov_ | | GATTTAAGGATTCTAAAAAATCGAAGATGCAAGTGTTTTATA | | | | | |
| 126.820801 | | TATCTGTGAACTAATACCCATCTAAAATGAACCAAT | | | | | |
| RAD_kmer_0003578_1_TGCAGGAAGTTCATTCAAATCGCAA | 462 | AAAATCGAAGATGCAAGTGTTTTATATATCTGTGAACTAATA | R | R | G | R | GYSNP1059 |
| CCTTGCAAAGGTAGTTCTATATCTTTCAATGGCTTTGAGCT | | CCCATCTAAAATGAACCAATTTTTTTTCCATGATTCAT[G/A]TA | | | | | |
| CCCGCCACCCTCTGTCTGCACAGGT_NODE_1_length_625_cov_ | | TTAAATATGTAAAGTTGTTATACCTTGTCAGGAGGAAGACTT | | | | | |
| 126.820801 | | GGAGAAGAAATTGATTTTCATCCAACTACCACCAAC | | | | | |
| RAD_kmer_0003581_1_TGCAGGTATGGTCAGGTATGGAACC | 376 | AGGATTTATCTTGGCTCCAATCATTCGAGATTGGTTCATACGA | R | A | G | A | GYSNP1060 |
| GGGTACACGATACCCAGTTTCAGTTTTTTTTGGGTCCGATC | | ATTGAAAAGTTTGATAAGAATAAGAATTAGGCCGCTC[G/A]A | | | | | |
| ATACCCCGTTTTTTGTGCACCTCTA_NODE_1_length_575_cov_ | | GCTTTTATGTTTCTAGCTTGACTTGAATGATTCGAGTCTGAGC | | | | | |
| 77.396523 | | TTGAGCCCAAATAACTTTATTATATCTTGACTCATT | | | | | |
| RAD_kmer_0003583_1_TGCAGGCTAGTCATCGTGTAGAATC | 120 | GTTAGTGGAGTATATTTTTTTAACGATATCCACAATGACCATA | R | R | R | G | GYSNP1061 |
| TGATGAAAGAAGACCTCTACTTCCTACTTGAATTGACCAG | | ATACGCCGTAAAGGGTTTTCTTTTCTTCTTAAAATGA[A/G]AT | | | | | |
| GGTAAGTTTCTATAATTACTATGTTG_NODE_2_length_398_ | | TTTTCTGTACCCTCGCCAACTAGAGCCAAAAGAATTCTTTGAA | | | | | |
| cov_54.894474 | | GAAGAAACCTGCATTGACCTTCATATATAAACAGG | | | | | |
| RAD_kmer_0003586_1_TGCAGGCTGCAGGCTTACCATTTAC | 304 | TAGAATATATAGTTGTCGTACATAGCTGTTGCATCCTATGTAT | A | A | T | A | GYSNP1062 |
| TATTCTAATTTCATTTTATAAATGACATGTTTCACAGTTTA | | ACGGCCTTTTGGAGAATCTTATGAAATTGTCATTTGA[T/A]AA | | | | | |
| TTGGATTTCTTGAACCGTATATGGA_NODE_length_632_cov_ | | AAACATCAAAACAGTTGCTAACTGATCCTCACACAAGACATT | | | | | |
| 129.993668 | | GACTAGTCAAATGAAACATTTTTCTTGTTTTGGAGA | | | | | |
| RAD_kmer_0003589_1_TGCAGGTCCGGAGAGGATTGCTAAG | 284 | GAGGACCGACTCCTGTGAATAGTCCCTTTATTCCTCCATCCCT | W | W | A | T | GYSNP1063 |
| CATGTCTGGTAATGAAAGTAGCCTTGCTAAAATTCTTGGT | | GTTCCATGATCAATGATCATAACAATGCATCTTGTCA[A T]AT | | | | | |
| GCAAACTTTGCAGCGGGGTTTGTTGC_NODE_1_length_612_ | | TTGTAATCAAATAATTGAAAAAAAAACTGATGTCGATAAAGT | | | | | |
| cov_74.854576 | | GGACAAATGATAAATACCGCCATATCTCAACAAGTG | | | | | |
| RAD_kmer_0003590_1_TGCAGGTACTATTACCGGAGTTGCT | 95 | GTATGTATGTATATGGCGTGCCAACAATAACCAGCCTACACT | — | A | C | A | GYSNP1064 |
| AACGCGGAAGCTGTCAAGTTGTCAGATTAATGTCATGTCC | | CTAATTTGGTAATTTCTACCTTTGATCCACCACACCAG[C/A]A | | | | | |
| ACTTTCCTTTTTTAACGATGCTTTAA_NODE_1_length_385_cov_ | | ACATGACCATCTAATAACTGGCAAAAAGATTAAGCCTACTGG | | | | | |
| 109.132469 | | AATTATAATGAACACCAAGAATTCATCGTTTGCTGAA | | | | | |
| RAD_kmer_0003590_1_TGCAGGTACTATTACCGGAGTTGCT | 194 | CTGGCAAAAAGATTAAGCCTACTGGAATTATAATGAACACCA | — | T | A | T | GYSNP1065 |
| AACGCGGAAGCTGTCAAGTTGTCAGATTAATGTCATGTCC | | AGAATTCATCGTTTGCTGAAACTAAAAArACCGAATAC[AT]T | | | | | |
| ACTTTCCTTTTTTAACGATGCTTTAA_NODE_length_385_cov_ | | CCAACAAAGTCGCATTTTTTGAAGCTTAGTTAACACTCAACA | | | | | |
| 109.132469 | | GCATCAAGCATAACAAAAGGCTCCAACAAAGTAACAA | | | | | |

TABLE 10
Information Regarding Guayule SNP Molecular Markers

| Marker | Major.Allele.Frquency | GenotypeNo | No. of obs. | GeneDiversity | Heterozygosity | PIC |
|---|---|---|---|---|---|---|
| SNP001 | 0.500 | 1 | 12 | 0.500 | 1.000 | 0.375 |
| SNP002 | 0.500 | 1 | 12 | 0.500 | 1.000 | 0.375 |
| SNP003 | 1.000 | 1 | 12 | 0.000 | 0.000 | 0.000 |
| SNP004 | 1.000 | 1 | 12 | 0.000 | 0.000 | 0.000 |
| SNP005 | 1.000 | 1 | 12 | 0.000 | 0.000 | 0.000 |
| SNP006 | 0.542 | 3 | 12 | 0.497 | 0.417 | 0.373 |
| SNP007 | 0.500 | 1 | 12 | 0.500 | 1.000 | 0.375 |
| SNP008 | 1.000 | 1 | 11 | 0.000 | 0.000 | 0.000 |
| SNP009 | 0.958 | 2 | 12 | 0.080 | 0.083 | 0.077 |
| SNP010 | 1.000 | 1 | 12 | 0.000 | 0.000 | 0.000 |
| SNP011 | 0.792 | 3 | 12 | 0.330 | 0.250 | 0.275 |
| SNP012 | 0.958 | 2 | 12 | 0.080 | 0.083 | 0.077 |
| SNP013 | 0.792 | 2 | 12 | 0.330 | 0.417 | 0.275 |
| SNP014 | 0.958 | 2 | 12 | 0.080 | 0.083 | 0.077 |
| SNP015 | 0.500 | 1 | 12 | 0.500 | 1.000 | 0.375 |
| SNP016 | 0.792 | 3 | 12 | 0.330 | 0.083 | 0.275 |
| SNP017 | 1.000 | 1 | 12 | 0.000 | 0.000 | 0.000 |
| SNP018 | 0.583 | 2 | 12 | 0.486 | 0.833 | 0.368 |
| SNP019 | 0.500 | 1 | 12 | 0.500 | 1.000 | 0.375 |
| SNP020 | 0.500 | 1 | 12 | 0.500 | 1.000 | 0.375 |
| SNP021 | 0.500 | 1 | 12 | 0.500 | 1.000 | 0.375 |
| SNP022 | 0.500 | 1 | 12 | 0.500 | 1.000 | 0.375 |
| SNP023 | 1.000 | 1 | 12 | 0.009 | 0.000 | 0.000 |
| SNP024 | 0.917 | 2 | 12 | 0.153 | 0.167 | 0.141 |
| SNP025 | 1.000 | 1 | 12 | 0.000 | 0.000 | 0.000 |
| SNP026 | 0.500 | 1 | 12 | 0.500 | 1.000 | 0.375 |
| SNP027 | 0.500 | 1 | 12 | 0.500 | 1.000 | 0.375 |
| SNP028 | 0.500 | 1 | 12 | 0.500 | 0.000 | 0.375 |
| SNP029 | 1.000 | 1 | 12 | 0.000 | 0.000 | 0.000 |
| SNP030 | 1.000 | 1 | 12 | 0.000 | 0.000 | 0.000 |
| SNP031 | 1.000 | 1 | 12 | 0.000 | 0.000 | 0.000 |
| SNP032 | 1.000 | 1 | 10 | 0.000 | 0.000 | 0.000 |
| SNP033 | 1.000 | 1 | 8 | 0.000 | 0.000 | 0.000 |
| SNP034 | 0.958 | 2 | 12 | 0.080 | 0.083 | 0.077 |
| SNP035 | 1.000 | 1 | 8 | 0.000 | 0.000 | 0.000 |
| SNP036 | 1.000 | 1 | 12 | 0.000 | 0.000 | 0.000 |
| SNP037 | 1.000 | 1 | 12 | 0.000 | 0.000 | 0.000 |
| SNP038 | 0.542 | 2 | 12 | 0.497 | 0.917 | 0.373 |
| SNP039 | 0.500 | 1 | 12 | 0.500 | 1.000 | 0.375 |
| SNP040 | 0.917 | 2 | 12 | 0.153 | 0.000 | 0.141 |
| SNP041 | 0.500 | 1 | 12 | 0.500 | 1.000 | 0.375 |
| SNP042 | 0.500 | 1 | 12 | 0.500 | 1.000 | 0.375 |
| SNP043 | 0.833 | 2 | 12 | 0.278 | 0.333 | 0.239 |
| SNP044 | 0.500 | 1 | 12 | 0.500 | 1.000 | 0.375 |
| SNP045 | 0.833 | 2 | 12 | 0.278 | 0.000 | 0.239 |
| SNP046 | 1.000 | 1 | 12 | 0.000 | 0.000 | 0.000 |
| SNP047 | 0.500 | 1 | 12 | 0.500 | 1.000 | 0.375 |
| SNP048 | 0.500 | 1 | 12 | 0.500 | 1.000 | 0.375 |
| SNP049 | 0.500 | 1 | 12 | 0.500 | 0.000 | 0.375 |
| SNP050 | 1.000 | 1 | 12 | 0.000 | 0.000 | 0.000 |
| SNP051 | 1.000 | 1 | 12 | 0.000 | 0.000 | 0.000 |
| SNP052 | 1.000 | 1 | 11 | 0.000 | 0.000 | 0.000 |
| SNP053 | 1.000 | 1 | 12 | 0.000 | 0.000 | 0.000 |
| SNP054 | 0.625 | 3 | 12 | 0.469 | 0.250 | 0.359 |
| SNP055 | 0.708 | 3 | 12 | 0.413 | 0.250 | 0.328 |
| SNP056 | 0.667 | 3 | 12 | 0.444 | 0.500 | 0.346 |
| SNP057 | 0.500 | 1 | 11 | 0.500 | 1.000 | 0.375 |
| SNP058 | 0.500 | 1 | 11 | 0.500 | 1.000 | 0.375 |
| SNP059 | 0.542 | 2 | 12 | 0.497 | 0.917 | 0.373 |
| SNP060 | 0.500 | 1 | 12 | 0.500 | 1.000 | 0.375 |
| SNP061 | 0.500 | 3 | 11 | 0.500 | 0.818 | 0.375 |
| SNP062 | 0.917 | 2 | 12 | 0.153 | 0.167 | 0.141 |
| SNP063 | 0.542 | 2 | 12 | 0.497 | 0.917 | 0.373 |
| SNP064 | 0.500 | 1 | 12 | 0.500 | 1.000 | 0.375 |
| SNP065 | 0.500 | 1 | 12 | 0.500 | 1.000 | 0.375 |
| SNP066 | 0.500 | 1 | 11 | 0.500 | 0.500 | 0.375 |
| SNP067 | 0.500 | 1 | 12 | 0.500 | 1.000 | 0.375 |
| SNP068 | 1.000 | 1 | 12 | 0.500 | 0.000 | 0.000 |
| SNP069 | 0.500 | 1 | 12 | 0.500 | 1.000 | 0.375 |
| SNP070 | 0.500 | 1 | 12 | 0.500 | 1.000 | 0.375 |
| SNP071 | 0.500 | 1 | 12 | 0.500 | 1.000 | 0.375 |
| SNP072 | 1.000 | 1 | 12 | 0.000 | 0.000 | 0.000 |
| SNP073 | 0.500 | 1 | 12 | 0.500 | 1.000 | 0.375 |
| SNP074 | 0.500 | 1 | 12 | 0.500 | 1.000 | 0.375 |
| SNP075 | 0.500 | 1 | 12 | 0.500 | 1.000 | 0.375 |
| SNP076 | 0.500 | 1 | 12 | 0.500 | 1.000 | 0.375 |
| SNP077 | 0.909 | 2 | 11 | 0.165 | 0.000 | 0.152 |
| SNP078 | 1.000 | 1 | 12 | 0.000 | 0.000 | 0.000 |
| SNP079 | 0.583 | 3 | 12 | 0.486 | 0.667 | 0.368 |
| SNP080 | 0.500 | 1 | 12 | 0.500 | 1.000 | 0.375 |
| SNP081 | 0.500 | 1 | 12 | 0.500 | 1.000 | 0.375 |
| SNP082 | 0.500 | 1 | 10 | 0.500 | 1.000 | 0.375 |
| SNP083 | 0.500 | 1 | 11 | 0.500 | 1.000 | 0.375 |
| SNP084 | 1.000 | 1 | 11 | 0.000 | 0.000 | 0.000 |
| SNP085 | 0.545 | 2 | 11 | 0.496 | 0.909 | 0.373 |
| SNP086 | 0.750 | 2 | 12 | 0.375 | 0.500 | 0.305 |
| SNP087 | 1.000 | 1 | 11 | 0.000 | 0.000 | 0.000 |
| SNP088 | 0.500 | 1 | 12 | 0.500 | 1.000 | 0.375 |
| SNP089 | 0.500 | 1 | 12 | 0.500 | 1.000 | 0.375 |
| SNP090 | 0.917 | 2 | 12 | 0.153 | 0.167 | 0.141 |
| SNP091 | 0.500 | 1 | 11 | 0.500 | 1.000 | 0.375 |
| SNP092 | 0.958 | 2 | 12 | 0.080 | 0.083 | 0.077 |
| SNP093 | 0.500 | 3 | 12 | 0.500 | 0.833 | 0.375 |
| SNP094 | 1.000 | 1 | 11 | 0.000 | 0.000 | 0.000 |
| SNP095 | 0.500 | 1 | 12 | 0.500 | 1.000 | 0.375 |
| SNP096 | 0.625 | 2 | 12 | 0.469 | 0.750 | 0.359 |
| SNP097 | 0.542 | 2 | 12 | 0.497 | 0.917 | 0.373 |
| SNP098 | 0.792 | 2 | 12 | 0.330 | 0.417 | 0.275 |
| SNP099 | 0.500 | 1 | 12 | 0.500 | 1.000 | 0.375 |
| SNP100 | 0.500 | 1 | 12 | 0.500 | 1.000 | 0.375 |
| SNP101 | 0.500 | 1 | 12 | 0.500 | 1.000 | 0.375 |
| SNP102 | 0.625 | 2 | 12 | 0.469 | 0.750 | 0.359 |
| SNP103 | 0.500 | 1 | 12 | 0.500 | 1.000 | 0.375 |
| SNP104 | 0.500 | 1 | 12 | 0.500 | 1.000 | 0.375 |
| SNP105 | 0.500 | 1 | 12 | 0.500 | 1.000 | 0.375 |
| SNP106 | 0.500 | 1 | 12 | 0.500 | 1.000 | 0.375 |
| SNP107 | 0.500 | 1 | 12 | 0.500 | 1.000 | 0.375 |
| SNP108 | 0.958 | 2 | 12 | 0.080 | 0.083 | 0.077 |
| SNP109 | 1.000 | 1 | 12 | 0.000 | 0.000 | 0.000 |
| SNP110 | 0.500 | 1 | 12 | 0.500 | 1.000 | 0.375 |
| SNP111 | 0.542 | 2 | 12 | 0.497 | 0.917 | 0.373 |
| SNP112 | 0.500 | 1 | 12 | 0.500 | 1.000 | 0.375 |
| SNP113 | 0.500 | 1 | 12 | 0.500 | 1.000 | 0.375 |
| SNP114 | 0.500 | 1 | 12 | 0.500 | 1.000 | 0.375 |
| SNP115 | 1.000 | 1 | 12 | 0.000 | 0.000 | 0.000 |
| SNP116 | 0.500 | 1 | 12 | 0.500 | 1.000 | 0.375 |
| SNP117 | 0.958 | 2 | 12 | 0.080 | 0.083 | 0.077 |
| SNP118 | 1.000 | 1 | 12 | 0.000 | 0.000 | 0.000 |
| SNP119 | 0.500 | 1 | 12 | 0.500 | 1.000 | 0.375 |
| SNP120 | 0.500 | 1 | 12 | 0.500 | 1.000 | 0.375 |
| SNP121 | 0.958 | 2 | 12 | 0.083 | 0.077 | 0.080 |
| SNP122 | 0.500 | 1 | 12 | 0.500 | 1.000 | 0.375 |
| SNP123 | 0.500 | 1 | 12 | 0.500 | 1.000 | 0.375 |
| SNP124 | 0.875 | 2 | 12 | 0.219 | 0.250 | 0.195 |
| SNP125 | 0.500 | 1 | 12 | 0.500 | 1.000 | 0.375 |
| SNP126 | 1.000 | 1 | 12 | 0.000 | 0.000 | 0.000 |
| SNP127 | 0.500 | 1 | 12 | 0.500 | 1.000 | 0.375 |
| SNP128 | 0.500 | 1 | 12 | 0.500 | 1.000 | 0.375 |
| SNP129 | 0.500 | 1 | 12 | 0.500 | 1.000 | 0.375 |
| SNP130 | 0.909 | 2 | 11 | 0.165 | 0.182 | 0.152 |
| SNP131 | 0.500 | 1 | 12 | 0.500 | 1.000 | 0.375 |
| SNP132 | 0.500 | 1 | 12 | 0.500 | 1.000 | 0.375 |
| SNP133 | 0.750 | 2 | 12 | 0.375 | 0.500 | 0.305 |
| SNP134 | 0.500 | 1 | 12 | 0.500 | 1.000 | 0.375 |
| SNP135 | 0.500 | 1 | 11 | 0.500 | 1.000 | 0.375 |
| SNP136 | 0.500 | 1 | 12 | 0.500 | 1.000 | 0.375 |
| SNP137 | 0.500 | 1 | 12 | 0.500 | 1.000 | 0.375 |
| SNP138 | 0.500 | 1 | 11 | 0.500 | 1.000 | 0.375 |
| SNP139 | 0.500 | 1 | 12 | 0.500 | 1.000 | 0.375 |
| SNP140 | 0.864 | 2 | 11 | 0.236 | 0.273 | 0.208 |
| SNP141 | 0.500 | 1 | 12 | 0.500 | 1.000 | 0.375 |
| SNP142 | 0.500 | 1 | 12 | 0.500 | 1.000 | 0.375 |
| SNP143 | 0.500 | 1 | 12 | 0.500 | 1.000 | 0.375 |
| SNP144 | 0.500 | 1 | 12 | 0.500 | 1.000 | 0.375 |
| SNP145 | 0.500 | 1 | 12 | 0.500 | 1.000 | 0.375 |
| SNP146 | 0.500 | 1 | 12 | 0.500 | 1.000 | 0.375 |
| SNP147 | 0.500 | 1 | 12 | 0.500 | 1.000 | 0.375 |
| SNP148 | 0.500 | 1 | 12 | 0.500 | 1.000 | 0.375 |
| SNP149 | 0.500 | 1 | 12 | 0.500 | 1.000 | 0.375 |
| SNP150 | 0.950 | 2 | 10 | 0.095 | 0.100 | 0.090 |
| SNP151 | 0.958 | 1 | 12 | 0.080 | 0.083 | 0.077 |
| SNP152 | 0.500 | 1 | 12 | 0.500 | 1.000 | 0.375 |
| SNP153 | 0.500 | 1 | 11 | 0.500 | 1.000 | 0.375 |
| SNP154 | 0.500 | 1 | 12 | 0.500 | 1.000 | 0.375 |
| SNP156 | 0.500 | 1 | 12 | 0.500 | 1.000 | 0.375 |
| SNP157 | 0.500 | 1 | 12 | 0.500 | 1.000 | 0.375 |
| SNP158 | 0.500 | 1 | 12 | 0.500 | 1.000 | 0.375 |
| SNP159 | 0.500 | 1 | 12 | 0.500 | 1.000 | 0.375 |
| SNP160 | 0.917 | 2 | 12 | 0.153 | 0.167 | 0.141 |
| SNP161 | 0.500 | 1 | 10 | 0.500 | 1.000 | 0.375 |
| SNP162 | 0.917 | 2 | 12 | 0.153 | 0.167 | 0.141 |
| SNP163 | 1.000 | 1 | 11 | 0.000 | 0.000 | 0.000 |
| SNP164 | 0.958 | 2 | 12 | 0.080 | 0.083 | 0.077 |
| SNP165 | 0.500 | 1 | 12 | 0.500 | 1.000 | 0.375 |
| SNP166 | 0.682 | 2 | 11 | 0.434 | 0.636 | 0.340 |
| SNP167 | 0.500 | 1 | 12 | 0.500 | 1.000 | 0.375 |
| SNP168 | 0.833 | 2 | 12 | 0.278 | 0.333 | 0.239 |
| SNP169 | 0.542 | 2 | 12 | 0.497 | 0.917 | 0.373 |
| SNP170 | 0.500 | 1 | 12 | 0.500 | 1.000 | 0.375 |
| SNP171 | 0.500 | 1 | 11 | 0.500 | 1.000 | 0.375 |
| SNP172 | 0.500 | 1 | 12 | 0.500 | 1.000 | 0.375 |
| SNP173 | 0.500 | 1 | 12 | 0.500 | 1.000 | 0.375 |
| SNP174 | 0.583 | 2 | 12 | 0.486 | 0.833 | 0.368 |
| SNP175 | 0.500 | 1 | 12 | 0.500 | 1.000 | 0.375 |
| SNP176 | 0.500 | 1 | 12 | 0.500 | 1.000 | 0.375 |
| SNP177 | 0.818 | 2 | 11 | 0.298 | 0.364 | 0.253 |
| SNP178 | 0.667 | 3 | 9 | 0.444 | 0.444 | 0.346 |
| SNP179 | 0.792 | 2 | 12 | 0.330 | 0.417 | 0.275 |
| SNP180 | 0.500 | 1 | 10 | 0.500 | 1.000 | 0.375 |
| SNP181 | 0.500 | 1 | 12 | 0.500 | 1.000 | 0.375 |
| SNP182 | 0.500 | 1 | 12 | 0.500 | 1.000 | 0.375 |
| SNP183 | 0.500 | 1 | 12 | 0.500 | 1.000 | 0.375 |
| SNP184 | 0.500 | 1 | 12 | 0.500 | 1.000 | 0.375 |
| SNP185 | 0.500 | 1 | 12 | 0.500 | 1.000 | 0.375 |
| SNP186 | 1.000 | 1 | 12 | 0.000 | 0.000 | 0.000 |
| SNP187 | 1.000 | 1 | 9 | 0.000 | 0.000 | 0.000 |
| SNP188 | 0.500 | 1 | 11 | 0.500 | 1.000 | 0.375 |
| SNP189 | 0.500 | 1 | 12 | 0.500 | 1.000 | 0.375 |
| SNP190 | 0.500 | 1 | 12 | 0.500 | 1.000 | 0.375 |
| SNP191 | 0.500 | 1 | 12 | 0.500 | 1.000 | 0.375 |
| SNP192 | 0.500 | 1 | 12 | 0.500 | 1.000 | 0.375 |
| SNP193 | 0.500 | 1 | 12 | 0.500 | 1.000 | 0.375 |
| SNP194 | 0.500 | 1 | 12 | 0.500 | 1.000 | 0.375 |
| SNP195 | 0.500 | 1 | 12 | 0.500 | 1.000 | 0.375 |
| SNP196 | 0.500 | 1 | 12 | 0.500 | 1.000 | 0.375 |
| SNP197 | 0.583 | 3 | 12 | 0.486 | 0.667 | 0.368 |
| SNP198 | 0.500 | 1 | 12 | 0.500 | 1.000 | 0.375 |
| SNP199 | 0.500 | 1 | 12 | 0.500 | 1.000 | 0.375 |
| SNP200 | 0.500 | 1 | 12 | 0.500 | 1.000 | 0.375 |
| SNP201 | 0.500 | 1 | 12 | 0.500 | 1.000 | 0.375 |
| SNP202 | 0.591 | 2 | 11 | 0.483 | 0.818 | 0.367 |
| SNP203 | 0.500 | 1 | 12 | 0.500 | 1.000 | 0.375 |
| SNP204 | 0.500 | 1 | 9 | 0.500 | 1.000 | 0.375 |
| SNP205 | 0.500 | 1 | 12 | 0.500 | 1.000 | 0.375 |
| SNP206 | 0.500 | 1 | 12 | 0.500 | 1.000 | 0.375 |
| SNP207 | 0.545 | 2 | 11 | 0.496 | 0.909 | 0.373 |
| SNP208 | 0.625 | 2 | 12 | 0.469 | 0.750 | 0.359 |
| SNP209 | 0.500 | 1 | 12 | 0.500 | 1.000 | 0.375 |
| SNP210 | 0.875 | 2 | 12 | 0.219 | 0.250 | 0.195 |
| SNP211 | 1.000 | 1 | 11 | 0.000 | 0.000 | 0.000 |
| SNP212 | 1.000 | 1 | 8 | 0.000 | 0.000 | 0.000 |
| SNP213 | 0.500 | 1 | 12 | 0.500 | 1.000 | 0.375 |
| SNP214 | 0.500 | 1 | 12 | 0.500 | 1.000 | 0.375 |
| SNP215 | 0.500 | 1 | 11 | 0.500 | 1.000 | 0.375 |
| SNP216 | 0.500 | 1 | 11 | 0.500 | 1.000 | 0.375 |
| SNP217 | 0.500 | 1 | 12 | 0.500 | 1..000 | 0.375 |
| SNP218 | 0.500 | 1 | 12 | 0.500 | 1.000 | 0.375 |
| SNP219 | 0.500 | 1 | 12 | 0.500 | 1.000 | 0.375 |
| SNP221 | 0.500 | 1 | 11 | 0.500 | 1.000 | 0.375 |
| SNP222 | 0.500 | 1 | 12 | 0.500 | 1.000 | 0.375 |
| SNP223 | 0.833 | 2 | 12 | 0.278 | 0.333 | 0.239 |
| SNP224 | 0.500 | 1 | 12 | 0.500 | 1.000 | 0.375 |
| SNP225 | 1.000 | 1 | 12 | 0.000 | 0.000 | 0.000 |
| SNP226 | 0.500 | 1 | 12 | 0.500 | 1.000 | 0.375 |
| SNP227 | 0.500 | 1 | 12 | 0.500 | 1.000 | 0.375 |
| SNP228 | 1.000 | 1 | 9 | 0.000 | 0.000 | 0.000 |
| SNP229 | 0.500 | 1 | 12 | 0.500 | 1.000 | 0.375 |
| SNP230 | 0.500 | 1 | 11 | 0.500 | 1.000 | 0.375 |
| SNP231 | 0.500 | 1 | 12 | 0.500 | 1.000 | 0.375 |
| SNP232 | 0.950 | 2 | 10 | 0.095 | 0.100 | 0.090 |
| SNP233 | 0.500 | 1 | 11 | 0.500 | 1.000 | 0.375 |
| SNP234 | 0.917 | 2 | 12 | 0.153 | 0.167 | 0.141 |
| SNP235 | 0.917 | 2 | 12 | 0.153 | 0.167 | 0.141 |
| SNP236 | 0.500 | 1 | 12 | 0.500 | 1.000 | 0.375 |
| SNP237 | 0.500 | 1 | 12 | 0.500 | 1.000 | 0.375 |
| SNP238 | 0.500 | 1 | 12 | 0.500 | 1.000 | 0.375 |
| SNP239 | 0.500 | 1 | 12 | 0.500 | 1.000 | 0.375 |
| SNP240 | 0.813 | 2 | 8 | 0.305 | 0.375 | 0.258 |
| SNP241 | 0.500 | 1 | 8 | 0.500 | 1.000 | 0.375 |
| SNP242 | 0.500 | 1 | 12 | 0.500 | 1.000 | 0.375 |
| SNP243 | 0.833 | 2 | 12 | 0.278 | 0.333 | 0.239 |
| SNP244 | 0.500 | 1 | 11 | 0.500 | 1.000 | 0.375 |
| SNP245 | 0.500 | 1 | 12 | 0.500 | 1.000 | 0.375 |
| SNP246 | 0.500 | 1 | 11 | 0.500 | 1.000 | 0.375 |
| SNP247 | 0.500 | 1 | 10 | 0.500 | 1.000 | 0.375 |
| SNP248 | 0.500 | 1 | 11 | 0.500 | 1.000 | 0.375 |
| SNP249 | 0.500 | 1 | 12 | 0.500 | 1.000 | 0.375 |
| SNP250 | 0.556 | 3 | 9 | 0.494 | 0.444 | 0.372 |
| SNP251 | 0.500 | 1 | 11 | 0.500 | 1.000 | 0.375 |
| SNP252 | 0.500 | 1 | 12 | 0.500 | 1.000 | 0.375 |
| SNP253 | 0.600 | 2 | 10 | 0.480 | 0.800 | 0.365 |
| SNP254 | 0.958 | 2 | 12 | 0.080 | 0.083 | 0.077 |
| SNP255 | 0.500 | 1 | 12 | 0.500 | 1.000 | 0.375 |
| SNP256 | 0.500 | 1 | 12 | 0.500 | 1.000 | 0.375 |
| SNP257 | 0.500 | 1 | 10 | 0.500 | 1.000 | 0.375 |
| SNP258 | 0.500 | 1 | 11 | 0.500 | 1.000 | 0.375 |
| SNP259 | 0.500 | 1 | 11 | 0.500 | 1.000 | 0.375 |
| SNP260 | 0.500 | 1 | 11 | 0.500 | 1.000 | 0.375 |
| SNP262 | 0.500 | 1 | 12 | 0.500 | 1.000 | 0.375 |
| SNP263 | 1.000 | 1 | 12 | 0.000 | 0.000 | 0.000 |
| SNP264 | 0.500 | 1 | 12 | 0.500 | 1.000 | 0.375 |
| SNP265 | 0.750 | 2 | 12 | 0.375 | 0.500 | 0.305 |
| SNP266 | 0.500 | 1 | 9 | 0.500 | 1.000 | 0.375 |
| SNP267 | 0.708 | 2 | 12 | 0.413 | 0.583 | 0.328 |
| SNP268 | 0.909 | 2 | 11 | 0.165 | 0.000 | 0.152 |
| SNP269 | 0.583 | 2 | 12 | 0.486 | 0.833 | 0.368 |
| SNP270 | 0.500 | 1 | 12 | 0.500 | 1.000 | 0.375 |
| SNP271 | 0.875 | 2 | 12 | 0.219 | 0.250 | 0.195 |
| SNP272 | 0.500 | 1 | 11 | 0.500 | 1.000 | 0.375 |
| SNP273 | 0.500 | 1 | 12 | 0.500 | 1.000 | 0.375 |
| SNP274 | 1.000 | 1 | 12 | 0.000 | 0.000 | 0.000 |
| SNP275 | 0.500 | 1 | 12 | 0.500 | 1.000 | 0.375 |
| SNP276 | 0.500 | 1 | 12 | 0.500 | 1.000 | 0.375 |
| SNP277 | 1.000 | 1 | 12 | 0.000 | 0.000 | 0.000 |
| SNP278 | 1.000 | 1 | 12 | 0.000 | 0.000 | 0.000 |
| SNP279 | 0.500 | 1 | 12 | 0.500 | 1.000 | 0.375 |
| SNP280 | 0.889 | 2 | 9 | 0.198 | 0.000 | 0.178 |
| SNP281 | 0.500 | 1 | 12 | 0.500 | 1.000 | 0.375 |
| SNP282 | 1.000 | 1 | 10 | 0.000 | 0.000 | 0.000 |
| SNP284 | 0.500 | 1 | 11 | 0.500 | 1.000 | 0.375 |
| SNP285 | 0.958 | 2 | 12 | 0.080 | 0.083 | 0.077 |
| SNP286 | 0.500 | 1 | 10 | 0.500 | 1.000 | 0.375 |
| SNP287 | 0.750 | 2 | 12 | 0.375 | 0.500 | 0.305 |
| SNP288 | 0.500 | 1 | 11 | 0.500 | 1.000 | 0.375 |
| SNP289 | 0.542 | 2 | 12 | 0.497 | 0.917 | 0.373 |
| SNP290 | 0.500 | 1 | 12 | 0.500 | 1.000 | 0.375 |
| SNP291 | 1.000 | 1 | 12 | 0.000 | 0.000 | 0.000 |
| SNP292 | 1.000 | 1 | 12 | 0.000 | 0.000 | 0.000 |
| SNP293 | 0.500 | 1 | 11 | 0.500 | 1.000 | 0.375 |
| SNP294 | 0.500 | 1 | 9 | 0.500 | 1.000 | 0.375 |
| SNP295 | 1.000 | 1 | 9 | 0.000 | 0.000 | 0.000 |
| SNP296 | 0.500 | 1 | 12 | 0.500 | 1.000 | 0.375 |
| SNP297 | 0.500 | 1 | 12 | 0.500 | 1.000 | 0.375 |
| SNP298 | 0.625 | 2 | 12 | 0.469 | 0.750 | 0.359 |
| SNP299 | 0.958 | 2 | 12 | 0.080 | 0.083 | 0.077 |
| SNP300 | 0.727 | 2 | 11 | 0.397 | 0.545 | 0.318 |
| SNP301 | 0.958 | 2 | 12 | 0.080 | 0.083 | 0.077 |
| SNP302 | 0.625 | 2 | 12 | 0.469 | 0.750 | 0.359 |
| SNP303 | 0.500 | 1 | 12 | 0.500 | 1.000 | 0.375 |
| SNP304 | 0.917 | 1 | 12 | 0.153 | 0.167 | 0.141 |
| SNP305 | 0.500 | 1 | 10 | 0.500 | 1.000 | 0.375 |
| SNP306 | 1.000 | 1 | 12 | 0.000 | 0.000 | 0.000 |
| SNP307 | 0.500 | 1 | 12 | 0.500 | 1.000 | 0.375 |
| SNP308 | 1.060 | 1 | 12 | 0.000 | 0.000 | 0.000 |
| SNP309 | 0.500 | 1 | 12 | 0.500 | 1.000 | 0.375 |
| SNP310 | 0.500 | 1 | 12 | 0.500 | 1.000 | 0.375 |
| SNP312 | 0.600 | 1 | 10 | 0.480 | 0.800 | 0.365 |
| SNP313 | 0.500 | 1 | 12 | 0.500 | 1.000 | 0.375 |
| SNP314 | 0.625 | 2 | 12 | 0.469 | 0.750 | 0.359 |
| SNP315 | 1.000 | 1 | 12 | 0.000 | 0.000 | 0.000 |
| SNP316 | 0.500 | 1 | 10 | 0.500 | 1.000 | 0.375 |
| SNP317 | 1.000 | 1 | 11 | 0.000 | 0.000 | 0.000 |
| SNP318 | 1.000 | 1 | 12 | 0.000 | 0.000 | 0.000 |
| SNP319 | 0.792 | 2 | 12 | 0.330 | 0.417 | 0.275 |
| SNP320 | 0.607 | 3 | 12 | 0.444 | 0.500 | 0.346 |
| SNP321 | 0.917 | 1 | 12 | 0.153 | 0.167 | 0.141 |
| SNP322 | 0.500 | 1 | 12 | 0.500 | 1.000 | 0.375 |
| SNP323 | 0.500 | 1 | 12 | 0.500 | 1.000 | 0.375 |
| SNP324 | 1.000 | 1 | 12 | 0.000 | 0.000 | 0.000 |
| SNP325 | 1.000 | 1 | 12 | 0.000 | 0.000 | 0.000 |
| SNP326 | 0.500 | 1 | 11 | 0.500 | 1.000 | 0.375 |
| SNP327 | 0.864 | 2 | 11 | 0.236 | 0.273 | 0.208 |
| SNP328 | 0.500 | 1 | 11 | 0.500 | 1.000 | 0.375 |
| SNP329 | 0.545 | 2 | 11 | 0.496 | 0.909 | 0.373 |
| SNP330 | 0.583 | 2 | 12 | 0.486 | 0.000 | 0.368 |
| SNP331 | 0.500 | 1 | 9 | 0.500 | 1.000 | 0.375 |
| SNP332 | 0.500 | 1 | 11 | 0.500 | 1.000 | 0.375 |
| SNP333 | 0.958 | 2 | 12 | 0.080 | 0.083 | 0.077 |
| SNP334 | 0.500 | 1 | 12 | 0.500 | 1.000 | 0.375 |
| SNP335 | 0.500 | 1 | 12 | 0.500 | 1.000 | 0.375 |
| SNP336 | 0.500 | 1 | 12 | 0.500 | 1.000 | 0.375 |
| SNP337 | 0.500 | 1 | 12 | 0.500 | 1.000 | 0.375 |
| SNP338 | 0.545 | 2 | 11 | 0.496 | 0.909 | 0.373 |
| SNP339 | 0.792 | 2 | 12 | 0.330 | 0.417 | 0.275 |
| SNP340 | 0.917 | 2 | 12 | 0.153 | 0.000 | 0.141 |
| SNP341 | 1.000 | 1 | 12 | 0.000 | 0.000 | 0.000 |
| SNP342 | 0.563 | 2 | 8 | 0.492 | 0.875 | 0.371 |
| SNP343 | 1.000 | 1 | 12 | 0.000 | 0.000 | 0.000 |
| SNP344 | 0.650 | 2 | 10 | 0.455 | 0.700 | 0.351 |
| SNP345 | 0.500 | 1 | 12 | 0.500 | 1.000 | 0.375 |
| SNP346 | 1.000 | 1 | 11 | 0.000 | 0.000 | 0.000 |
| SNP347 | 0.571 | 2 | 7 | 0.490 | 0.857 | 0.370 |
| SNP348 | 1.000 | 1 | 11 | 0.000 | 0.000 | 0.000 |
| SNP349 | 0.545 | 2 | 11 | 0.496 | 0.909 | 0.373 |
| SNP350 | 0.500 | 1 | 11 | 0.500 | 1.000 | 0.375 |
| SNP351 | 1.000 | 1 | 12 | 0.000 | 0.000 | 0.000 |
| SNP352 | 0.682 | 2 | 11 | 0.434 | 0.636 | 0.340 |
| SNP353 | 0.500 | 1 | 11 | 0.500 | 1.000 | 0.375 |
| SNP354 | 1.000 | 1 | 11 | 0.000 | 0.000 | 0.000 |
| SNP355 | 0.500 | 1 | 9 | 0.500 | 1.000 | 0.375 |
| SNP356 | 0.500 | 1 | 9 | 0.500 | 1.000 | 0.375 |
| SNP357 | 0.773 | 2 | 11 | 0.351 | 0.455 | 0.290 |
| SNP358 | 0.542 | 3 | 12 | 0.497 | 0.083 | 0.373 |
| SNP359 | 0.500 | 1 | 9 | 0.500 | 1.000 | 0.375 |
| SNP360 | 0.563 | 2 | 8 | 0.492 | 0.875 | 0.371 |
| SNP361 | 0.583 | 3 | 12 | 0.486 | 0.667 | 0.368 |
| SNP362 | 0.500 | 1 | 12 | 0.500 | 1.000 | 0.375 |
| SNP363 | 0.667 | 2 | 12 | 0.444 | 0.000 | 0.346 |
| SNP364 | 0.500 | 1 | 12 | 0.500 | 1.000 | 0.375 |
| SNP365 | 0.542 | 2 | 12 | 0.497 | 0.917 | 0.373 |
| SNP366 | 0.542 | 2 | 12 | 0.497 | 0.917 | 0.373 |
| SNP367 | 1.000 | 1 | 12 | 0.000 | 0.000 | 0.000 |
| SNP368 | 0.500 | 1 | 10 | 0.500 | 1.000 | 0.375 |
| SNP369 | 0.500 | 1 | 12 | 0.500 | 1.000 | 0.375 |
| SNP370 | 0.500 | 1 | 11 | 0.500 | 1.000 | 0.375 |
| SNP371 | 1.000 | 1 | 12 | 0.000 | 0.000 | 0.000 |
| SNP372 | 0.500 | 1 | 10 | 0.500 | 1.000 | 0.375 |
| SNP373 | 0.500 | 1 | 12 | 0.500 | 1.000 | 0.375 |
| SNP374 | 0.500 | 1 | 12 | 0.500 | 1.000 | 0.375 |
| SNP375 | 0.500 | 1 | 10 | 0.500 | 1.000 | 0.375 |
| SNP376 | 0.500 | 1 | 12 | 0.500 | 1.000 | 0.375 |
| SNP377 | 0.500 | 1 | 12 | 0.500 | 1.000 | 0.375 |
| SNP378 | 0.500 | 1 | 12 | 0.500 | 1.000 | 0.375 |
| SNP379 | 0.750 | 2 | 12 | 0.375 | 0.500 | 0.305 |
| SNP380 | 0.500 | 1 | 12 | 0.500 | 1.000 | 0.375 |
| SNP381 | 1.060 | 1 | 12 | 0.000 | 0.000 | 0.000 |
| SNP382 | 0.875 | 2 | 12 | 0.219 | 0.250 | 0.195 |
| SNP383 | 0.500 | 1 | 11 | 0.500 | 1.000 | 0.375 |
| SNP384 | 0.500 | 1 | 11 | 0.500 | 1.000 | 0.375 |
| Mean | 0.652 | 1.322 | 11.551 | 0.369 | 0.677 | 0.281 |

TABLE 11
SSRs and SSR Primer Sequences from Contigs and Annealing Temperatures

| | | | TM | | | Product | |
|---|---|---|---|---|---|---|---|
| SSR | Contig | Forward | Forward | Reverse | TM Reverse | Size | Repeat |
| 1 | Contig5 | ACACAACGACCCAGAAAACC | 59.867 | GACCCATCATCACCAGACTT | 57.314 | 475 | (CAT)4 |
| 2 | Contig8 | CCATCCTTCCTTCCTTCTTC | 57.77 | CAAGATATGCTTCGGTGAGG | 58.325 | 455 | (CAT)4 |
| 3 | Contig10 | AAGGAGAGGAGAAGAATGGG | 57.373 | GCCACTAGTAGGCTCAACCA | 57.98 | 435 | (TCT)5-(TCT)6- |
| | | | | | | | (ACA)4 |
| 4 | Contig26 | ACCACCTTCCCCTTAACAAC | 57.882 | GACCCTAACCACTTCCGAAT | 57.974 | 351 | (CAC)4 |
| 5 | Contig33 | TTAACCACTTAACCCTCCCC | 57.904 | CAGGAAGCGGAGACTCATAA | 58.048 | 429 | (CA)9 |
| 6 | Contig34 | TGTCGGCCTCTATCTCTCTG | 58.129 | ATGGCATCTTCACTCTCAGC | 57.969 | 180 | (AAG)4 |
| 7 | Contig39 | CCAACAAGTCCTCAAACACG | 59.183 | AATCAGAAGGGCAGAACTCC | 58.324 | 491 | (TAT)4 |
| 8 | Contig47 | ATAACTGGACTCACCAACCG | 57.514 | GATAGCACCGATGGAGAAGA | 57.834 | 360 | (GTC)4 |
| 9 | Contig69 | CAGTGTAGCCATCCTTCACC | 58.158 | TGTGAGGTTTGTGTGGAGTG | 58.063 | 107 | (CAACCA)5 |
| 10 | Contig74 | CTCTCTCCACATCAATGGC | 56.593 | GCAAGTGGGTCTTTACCCTT | 58.174 | 337 | (GAA)5 |
| 11 | Contig86 | CTAAATGGTCCTCCTGCTCA | 57.894 | GAAGCTCAACCTGCCTATGA | 58.048 | 498 | (CCG)4 |
| 12 | Contig93 | CCATCAATATCCACCGTACC | 57.61 | GTGTCAGATAGCGGCAGAAT | 57.921 | 202 | (CA)8 |
| 13 | Contig94 | GTCAAGTGGAGCTGTGGAGT | 57.844 | AAAGGTTGGGTAGATCCGTC | 57.974 | 454 | (TTC)4 |
| 14 | Contig104 | CTCAATCACTCACTCCACCA | 57.09 | CAGAGCTGATGCTAGCCAGT | 58.371 | 307 | (ACC)4 |
| 15 | Contig110 | CTCCGCCCATAAAACAAGAC | 59.569 | TCTGCCACACTTGACTCTGA | 58.03 | 283 | (TCT)4-(AC)6 |
| 16 | Contig132 | CCCACCACCTCCATTACATA | 58.145 | GCTCCAGATGGAGTCGTTTA | 57.893 | 293 | (ACA)4 |
| 17 | Contig147 | GATACTCCTGGGCTGTTTGA | 57.737 | CGATTCAGGGCAGTCTTCTA | 58.048 | 279 | (AAG)4 |
| 18 | Contig152 | ACACCTTTTCCCGTCCTTAG | 58.174 | GAAAGAGACAGCGGTTGAGA | 58.158 | 163 | (TCC)4 |
| 19 | Contig154 | CCCTTTCTTCTTCATCCCTC | 57.77 | GATGTTGACGATGACGAGTG | 57.573 | 134 | (CCA)4 |
| 20 | Contig155 | CTCCATCTTCCAAACCCACT | 58.989 | CCTCTTATCCCTCCCCATAA | 57.94 | 207 | (AAC)4 |
| 21 | Contig158 | TCAGGGCTAACTTCCTCTCA | 57.612 | GCTACAACTGGTGGGTGAAC | 58.058 | 355 | (CAC)5-(CCA)4 |
| 22 | Contig167 | GTTATGGACGCCGTTACTTG | 58.174 | CTCGCTTCGACAATCTCTGT | 58.187 | 226 | (TAA)5 |
| 23 | Contig180 | CCTTAACTCCACAGTTCCCC | 58.498 | AATCCGGTTGACTGGCTTAC | 59.056 | 438 | (ACAT)4 |
| 24 | Contig184 | TACTTTCAAGTCTCACCGCC | 57.951 | CAAGGGATAGCGTCACAGTT | 57.8.26 | 417 | (AAC)6 |
| 25 | Contig197 | GTGGTTGTAATCAAGGACGG | 57.923 | GAGACACAGGCACACAGATG | 57.714 | 385 | (TG)6 |
| 26 | Contig221 | CTTCTCTCTCCACATCCCAA | 57.78 | GATCCAACACCACCACTCTC | 57.886 | 419 | (GAG)4 |
| 27 | Contig232 | TGAGTTTCGTGGCTCTAAGG | 58.105 | CTCGTCGACTCAACGGTACT | 57.959 | 150 | (ATA)4 |
| 28 | Contig234 | CTGGCTGAAACAGGTGAAGT | 57.93 | GGCTACTTTCCTTTGCCCT | 58.398 | 440 | (GCT)4 |
| 29 | Contig236 | ATGGAGGGACCTTAAAACCC | 59.148 | GTCATTAACGACACGTTCCC | 57.922 | 225 | (TCT)4 |
| 30 | Contig238 | CCTCTGCCTACTCGTCAAAA | 58.105 | AGACGACGAACAAGACGAAG | 58.087 | 261 | (CA)6 |
| 31 | Contig245 | CGAGTTCCTTCAAGTCCTCA | 58.001 | CGACGAGTTAACGCTTCTGT | 58.187 | 187 | (AAT)5 |
| 32 | Contig265 | TCTGTAAGGCGGTTTCTGTC | 57.951 | ATAGAAGCAGGCATGGTGAG | 57.922 | 346 | (ACA)4 |
| 33 | Contig277 | GATCCTATTGCTCGTTGCC | 58.257 | ACTGCCCGATATCTCCTTTC | 58.214 | 371 | (ATT)4-(CA)6 |
| 34 | Contig294 | CTCCTATCAAAGGACGGAGA | 56.925 | ATCCTTGGACAGTAGCACCA | 58.158 | 459 | (TAA)6 |
| 35 | Contig295 | ACTGAGCCACCACTAACCAG | 57.801 | TAGACTTAGTGGCACCAGCC | 57.98 | 434 | (TTG)4 |
| 36 | Contig298 | ATTCAAAGGCCAGGGTAGAG | 58.266 | CGACTACAAACCGGACACTC | 58.215 | 297 | (TCA)4 |
| 37 | Contig312 | GCTGAGGAAGAGCATGGATA | 57.99 | CTCCACCATGTACCCGTT | 56.656 | 440 | (ACA)4 |
| 38 | Contig321 | CAGTGTAGCCATCCTTCACC | 58.158 | CACAGACCCAGCAAAGAACT | 57.93 | 202 | (ACAACC)4 |
| 39 | Contig335 | GAATGGGAGTGTGAATGGAG | 57.91 | TACTCCAAGATCAAGCCTGC | 58.048 | 308 | (AGA)4 |
| 40 | Contig339 | CAATTCTCTCTCCTCCCCAT | 58.118 | GAGGTGGTTTCTGGTTGTTG | 58.03 | 110 | (CTC)5 |
| 41 | Contig343 | ACAATAAGGAAGAGGGCCAC | 58.121 | GGCTGAAGTCTTGTGCTCAT | 58.028 | 365 | (TGG)5 |
| 42 | Contig349 | CCGTCTCATTGACCTACCTT | 56.702 | ACCTGGCCCCACTTCTATAC | 58.001 | 427 | (GAC)5 |
| 43 | Contig353 | CCTCCCTCCTTCTTCTGGTA | 58.323 | CAGCCTTGGATCTTGTGAAC | 58.287 | 347 | (TAC)4 |
| 44 | Contig357 | CAGACGTCATTGCTGAAGTG | 57.977 | ACTGGAAGTCTGCCCTTTTC | 58.377 | 405 | (CCA)4 |
| 45 | Contig363 | AAATATCTCCCCAACCCCTC | 59.104 | TCAGGCTTAGTTGTTCCAGG | 57.952 | 356 | (CT)6 |
| 46 | Contig366 | ACGAAGCAGTTTACCACCAC | 57.729 | CACCGTATCTTCGCACTTCT | 57.98 | 161 | (AGG)4 |
| 47 | Contig370 | CCATGGTTAGGACTCAGGTC | 57.001 | CCCAAGTTCAGACCGTAGAT | 56.702 | 133 | (TC)6 |
| 48 | Contig371 | CGTATCACTTTCAACCCGAC | 58.076 | TCTCGCCTTCTCTATTGGTG | 58.048 | 408 | (GAG)4 |
| 49 | Contig375 | ATCCTGTTCTTGACGAGCTG | 58.029 | AGCTCGTTACGTTGGTTGTC | 57.883 | 454 | (TGA)4 |
| 50 | Contig380 | CCATCGATCATCAGTTAGGG | 57.962 | GTTGCTCCACCAAGTACACC | 58.058 | 365 | (TCG)4 |
| 51 | Contig382 | GCCTGAAATCAAGTGTGTCC | 58.129 | CATAGGTTCCATGGGTTACG | 57.823 | 478 | (TTC)4 |
| 52 | Contig390 | CTCAAGCCCTACATCTTCCC | 58.741 | TCTTAGGAGCACGTCCAAAC | 57.951 | 164 | (TAA)4-(TGCC)4 |
| 53 | Contig390 | GGTGGAGACCCTGAGAAGTT | 58.159 | CATACCAGAACCTTGGCATC | 58.019 | 396 | (TGG)4 |
| 54 | Contig392 | CAACACTCAACACCTCGTGA | 58.232 | TCATACTGCATACCCGAACC | 58.45 | 340 | (GAT)4 |
| 55 | Contig393 | GTATTGTTCAAGTGTGGGGG | 57.768 | GGGTGACATATTTGGGTTGG | 59.9 | 497 | (TA)6 |
| 56 | Contig395 | GCAACAACAATGGCAACC | 58.458 | AGGTGGTCCACTATGCTCTG | 57.74 | 386 | (TCC)5 |
| 57 | Contig401 | TTACCCACTGACGTCATCCT | 58 | TGTATCCGTCACCTCCTCAT | 57.94 | 343 | (ATA)6 |
| 58 | Contig403 | GTTTCTTCAAGCGTCCTC | 58.802 | GCTCTTCACCCAGTCAAAGA | 58 | 490 | (GAT)5 |
| 59 | Contig414 | ACGCTTCTTCAGTGCTTCTG | 58.398 | CCTGTTCCCAGCTTTTAACC | 58.694 | 495 | (AC)9 |
| 60 | Contig421 | AACCGTCTAAAACCCGACTC | 58.174 | GTTACCGGAGAGGATGGATT | 57.918 | 213 | (ACC)4 |
| 61 | Contig422 | CTCACTTGTATCATTGCCCC | 58.019 | GTCAAGCCCATCTGTGACTC | 58.216 | 432 | (AAC)6-(TGA)4 |
| 62 | Contig467 | GCAGGCCGTATCACAAATAC | 58.12 | TAGGTGGATAGAACACCGGA | 58.02 | 241 | (CCA)4 |
| 63 | Contig468 | AAACCCTAGACACCGAAACC | 58.029 | CGTCACCAAAACCCTACAAC | 57.98 | 435 | (GCC)5 |
| 64 | Contig468 | GTTGTAGGGTTTTGGTGACG | 57.98 | GACCAATAGCAAGAGCAAGC | 57.725 | 243 | (GGA)4 |
| 65 | Contig471 | ACACCCCTCTCTCTCTTGCT | 58.06 | AATATGGGCTATCAGAGGGC | 58.109 | 245 | (TTG)5 |
| 66 | Contig473 | ACAACACTGTGTAATGGCCC | 58.343 | CCCCATATCCATAACTTCCC | 58.057 | 342 | (ACC)5 |
| 67 | Contig482 | TCTCATCTCAATGCTCCTCC | 57.879 | GCATCTGACGCTTGTAGCTC | 58.78 | 325 | (AAT)4-(TCC)5 |
| 68 | Contig484 | AACAATACCTCGCACTCTGC | 57.979 | GTTGGCTATGATTGGACGAC | 58.019 | 411 | (AAC)6 |
| 69 | Contig487 | ATCTTGCCTCTCTAAAGCCC | 57.639 | CGGAAGCACGATGAACTAGA | 59.024 | 327 | (AG)6 |
| 70 | Contig496 | TACCCTCCTCAGACCCTACC | 58.05 | AGCCCCACTTACCATGATCT | 58.473 | 143 | (ATG)6 |
| 71 | Contig498 | CTCAAGCGTATGAGTTGGCT | 58.132 | CCGGGACTTTTTACTCCTTC | 57.787 | 229 | (GAT)4 |
| 72 | Contig525 | CTGTTTCACCGATTCTGACC | 58.129 | ATGCACCTAAGTCCACAGGA | 58.158 | 473 | (TAA)5 |
| 73 | Contig534 | GACCAACACCCCCTTTTC | 57.718 | GACCAGCCAACACAAAGAAC | 38.187 | 294 | (TC)8 |
| 74 | Contig539 | AACAGCTGGAGACCCAAGTA | 57.387 | TAACCTACCAACTCGCTTGC | 58.054 | 278 | (GGT)4 |
| 75 | Contig546 | ACCCTAGATCCTCGGTTCAC | 18.049 | GCTTCGACAGGCAGTTATGT | 57.979 | 440 | (CCA)4 |
| 76 | Contig548 | GACGATGAGTTCAGAAACGG | 58.287 | GACACGTCATTTCCACCTTC | 57.97 | 370 | (TAC)5 |
| 77 | Contig570 | ATCCTCCCAAGAAGATGACC | 57.964 | TCTCTCCTGCAAGAAGCTGT | 57.9 | 230 | (AAC)4 |
| 78 | Contig577 | AAGAAGAGGAGCCTGGGTTA | 58.002 | GAAGGAAAAAGAGGCGTACC | 57.929 | 253 | (TCT)4 |
| 79 | Contig582 | TGGCGAAAGAAGAAGAGG | 56.587 | GAGAGGATGGCTATAAGGGG | 57.702 | 466 | (ATG)5 |
| 80 | Contig582 | CATGCTACCCCTTATAGCCA | 57.754 | GTTTTGTAGGACAAGTCCGC | 58.433 | 177 | (AACCGA)4 |
| 81 | Contig591 | TGGAGTCTCCTGCTTCAAAC | 58 | GTGTTGGTGTGTGCTATCCA | 57.945 | 335 | (CAG)4 |
| 82 | Contig592 | CTACTGGTGGAGAAGGATGC | 57.323 | ACCTTCACTCACAAAGCTCG | 58.087 | 281 | (CCA)5 |
| 83 | Contig606 | GTCATCTCAACCACCACCAT | 58.186 | GGATGACAAGAGGACGTGAG | 58.216 | 242 | (CAC)4 |
| 84 | Contig612 | ACAAACCCTAACTGGACCGT | 58.429 | TTCACGCTCGAGTCTTAACC | 58.104 | 157 | (CCA)4 |
| 85 | Contig619 | TCTCTCTCCTCACCTACGTCAT | 58.01 | AAATCCTCAAGACTGGTCCC | 58.021 | 390 | (AAT)4 |
| 86 | Contig629 | TCAGGGTAAGGAGGAAGGAC | 58.173 | CGAGAATCTTCCCCGAGTAT | 58.214 | 315 | (TGA)4 |
| 87 | Contig629 | AGATTCTCGAGTGTGCTTGG | 58.029 | GACCTCGCTCCCTAATTACA | 56.909 | 318 | (CCA)4 |
| 88 | Contig632 | CTGCCTGCGTTTTCTCAT | 57.474 | GGAGATTCTTGGAGGAAGGA | 58.242 | 398 | (TTA)4 |
| 89 | Contig635 | GAAAGCGGATCACACAGC | 57.817 | TTCTCCAGAACATCCGAGTG | 58.8 | 314 | (CTAT)4 |
| 90 | Contig639 | TTCAACCTTAGGTCCAGACG | 57.799 | CTAGCACCAGCCGTAACAAT | 57.933 | 327 | (CAC)4 |
| 91 | Contig645 | GTCACCACTTCCTCCAAATG | 57.971 | TGGTGCTGATGATACAGTGG | 58.05 | 445 | (TAC)4 |
| 92 | Contig647 | TTACGGACGGAGACAAGAAG | 57.952 | TCATCATAGTGCTTGCGG | 56.735 | 259 | (CAC)4 |
| 93 | Contig663 | CCAAATCAACACCACCACC | 59.641 | CACTGCTCTTACGGATTGCT | 58.132 | 229 | (TCAC)4 |
| 94 | Contig686 | CTCATTCACCTCCCACCTAA | 57.582 | TACTTGACCTACTGGCAGGC | 57.98 | 468 | (AAT)4 |
| 95 | Contig711 | ACGAAGATGCACTCCTGAAG | 58.029 | AGCGGTCATGAGTCGATTAG | 57.922 | 315 | (ATG)4 |
| 96 | Contig716 | CCTGTTGCTTCTAGGGTGAA | 57.952 | GAACGGGTCTCCAAGGTTAT | 57.974 | 306 | (AGC)6-(TGA)5 |
| 97 | Contig717 | CCACCTCCATCTTAACCCAT | 58.715 | CATAAGCCGAAGTCACCCTA | 57.85 | 373 | (ATA)4 |
| 98 | Contig720 | TTTGTAACCCTCACACACCC | 58.315 | CAGTACTGACGGCGACTTCT | 58.116 | 224 | (AGG)4 |
| 99 | Contig722 | CTCACTCTCTCTCCAGAAGCA | 57.464 | GCACAGCTCCACTCATCTTT | 58.028 | 260 | (GAT)4 |
| 100 | Contig727 | CCCATGTACCGATCAAAGAG | 58.02 | AGGATAACCATAGCCCGGT | 58.347 | 326 | (CAA)4 |
| 101 | Contig728 | GACGGAAATAAACCGTCGTC | 59.434 | GAGAAGTTTTCTCGCGTGTG | 58.65 | 430 | (GGT)4 |
| 102 | Contig734 | CACGTTCCTCCTACCGTAAA | 57.758 | CTAGAACGTCGGAAGGTTGA | 57.952 | 108 | (CTA)5 |
| 103 | Contig737 | GAACGTTGACAAGGTGGAAC | 58.029 | TCGTGTCACGTGGAACATAC | 57.945 | 242 | (TGG)4 |
| 104 | Contig739 | ACGGTATCGTCCTTTCCTTC | 58.121 | AGCATCTCAACGATGCCTAC | 57.921 | 404 | (AGA)5 |
| 105 | Contig744 | TAGTACCACTCCACAAGCCC | 57.671 | TGATGACACCCTTGACAGTG | 57.999 | 204 | (TCC)4 |
| 106 | Contig747 | GACACTCTCTCTCATCCCCA | 57.686 | GCCTCTGCTCTCCTCTTTCT | 57.953 | 302 | (TC)6-(CAC)4 |
| 107 | Contig750 | GACCCATACACAGGCGTTAG | 18.104 | CTGTGAAGCCACATCAACAC | 57.64 | 274 | (TGA)4 |
| 108 | Contig754 | CTCCCTCACTCTTCGAAACA | 58.001 | GCCGACGTAACAGAACAGAT | 57.824 | 369 | (CT)8 |
| 109 | Contig757 | AGCAAATTGGGGCTGTGT | 59.09 | GAGGCCCATATTCTCCAATC | 58.402 | 484 | (ATT)4 |
| 110 | Contig762 | GTTGCTGTCGAAAAGCTCC | 58.585 | CCGAGTGAGCTGTGGTTAGT | 57.959 | 179 | (TC)8 |
| 111 | Contig780 | CTCTCACTCCTCTCAGCAGC | 57.979 | TGTTAAACTCACCTCCGGTC | 57.64 | 439 | (ATG)5 |
| 112 | Contig808 | CCCCTTTCATCTCTCTAGCC | 57.946 | CCGAGCTCTTTCCTAGCTTT | 57.983 | 406 | (AG)8 |
| 113 | Contig816 | GGCCCAGAATCAAGGAAGTA | 59.126 | GGATCCTCACATTCATCTGC | 58.01 | 354 | (GTG)4 |
| 114 | Contig826 | CCCCAATCAAAGCCCTAA | 58.492 | CAAACACACCTTGTTCCTCC | 58.03 | 371 | (TTC)5-(ACC)4 |
| 115 | Contig829 | GTGAAAGGGATGTGTTGGAG | 57.971 | CCCAACCTCATCTTCTCCTC | 58.664 | 122 | (GAT)4 |
| 116 | Contig830 | CAAGGAAGTGGTTGAAGGAG | 57.36 | GTAGGACGCGTAACGATCTC | 57.449 | 298 | (AAG)4 |
| 117 | Contig836 | AATAAGACCCACACCCAACC | 58.62 | GTGACGATGGATGTAAAGGC | 58.019 | 175 | (TCA)5-(TTA)5 |
| 118 | Contig849 | GGTAGGTCGCCTAAGAGAGG | 58.029 | CAGACCACACTATTTCCCCC | 59.259 | 457 | (CTT)4 |
| 119 | Contig854 | GTAACCACATGGACGATGCT | 58.444 | GCAGCTGAATCTCCAACACT | 58.028 | 412 | (CATTCA)4- |
| | | | | | | | (TCA)5-(ATG)4 |
| 120 | Contig868 | CCCTACACTCCACCACACTC | 57.979 | TGATCGGAGGAGGTAGTCAG | 57.81 | 483 | (CCA)5 |
| 121 | Contig880 | GGGAAGGAAAGAAAGTGAGG | 57.827 | GTCTTCAGGATGCACCATTC | 58.07 | 332 | (TAA)4-(TCC)6 |
| 122 | Contig880 | TACTCAGGTGATGGTGGGTT | 57.84 | GTCTTCAGGATGCACCATTC | 58.07 | 241 | (TGT)4 |
| 123 | Contig904 | ACCCTAGGGGACGATTGTAG | 58.002 | TTCCCTTTAGGCTGTGAGTG | 57.952 | 257 | (ATA)4 |
| 124 | Contig912 | GTCATCTCCAACCACCGTA | 56.809 | GTGTGAGAGGGAGATTGTGG | 58.052 | 207 | (CA)7 |
| 125 | Contig919 | TGCTCCTACAGAGCCAAAAG | 58.256 | CCAACCAGATCCACAAGAAG | 58.13 | 323 | (TGCA)4 |
| 126 | Contig932 | CCCTACCACCTGTTGTCAAG | 58.059 | AGATCCACACAAGCTCCAAG | 57.87 | 328 | (CCA)4 |
| 127 | Contig955 | TGAGTTTCGTGGCTCTAAGG | 58.105 | GAACGGTAGACGGAGCACTA | 57.98 | 224 | (ATA)4 |
| 128 | Contig964 | CACCAAGCTTTTCTGGTCC | 58.272 | AGATGGAGGGGTATGAGAGG | 57.993 | 142 | (AG)8 |
| 129 | Contig974 | CTATTGATGCCCCTCTCTCTC | 57.96 | AAAACCCCACATCTCTCTCC | 58.021 | 111 | (TC)6 |
| 130 | Contig981 | GATTACTCGTTCAACGGTCG | 58.228 | AGGAGGAAAAAGGGGGTACT | 58.074 | 327 | (TAG)6 |
| 131 | Contig1011 | AGAGAAATCTGCACCACTCG | 58.029 | CTCCTTCTTCTTCGCCTTCT | 57.882 | 465 | (ATG)4 |
| 132 | Contig1048 | GCCGCCTCCACTAGATAAA | 57.929 | AGCATCTTAGCCTCAGGGTT | 58.028 | 283 | (GAA)4 |
| 133 | Contig1051 | CGTCTCCTATCATCCGATTG | 58.117 | GGAGAAGACGATAAGCACCA | 57.893 | 352 | (TTA)4 |
| 134 | Contig1053 | CCGAGTAACCCAACATTCTG | 58.077 | AAGATCCCAAGAACCCAGTC | 58.021 | 397 | (TGA)5 |
| 135 | Contig1054 | CCCTATGTTTCCGATCCTCT | 58.067 | ATCAGCGCTAGATGCTTCAC | 58.229 | 203 | (TCA)4 |
| 136 | Contig1063 | GCAAAACAGATCTACCACCG | 58.228 | CGACTAATGGGTCGAATGAG | 58.173 | 345 | (CTTCAC)6- |
| | | | | | | | (CTC)4-(ACC)4 |
| 137 | Contig1068 | AACTCCAAACTCCACCTCTC | 55.784 | GCTCCAGATGGAGTCGTTTA | 57.893 | 205 | (ACA)4 |
| 138 | Contig1069 | CCCCTAGGGTTTCATTCACT | 57.975 | CCTGTTGTCCTGCTTGTTCT | 57.93 | 203 | (AC)6 |
| 139 | Contig1081 | AAAGCAGCAACACTCTCCC | 58.014 | ATCTCAACCTCCTCAAACCC | 58.021 | 226 | (TAA)4-(ATC)5 |
| 140 | Contig1095 | TGGCCTCTTCTTCTAGGGTT | 58.002 | CACGTGTTCTTTCTCAGCCT | 58.087 | 101 | (TTC)4 |
| 141 | Contig1098 | GCAACCCATCTCACACATAC | 56.335 | CACACACGTGTACTCCTCCA | 58.094 | 416 | (AAT)4-(TAA)5 |
| 142 | Contig1098 | AGCTGTTGGAGGAGTACACG | 57.959 | CTGCTGGTACCGACATTCTT | 57.826 | 293 | (TGG)4 |
| 143 | Contig1107 | GGCTATCCACAAATGTACGC | 58.12 | GCATAGTGGCTCCTGTTGTC | 58.316 | 206 | (CCA)4 |
| 144 | Contig1117 | CACCCTCTTCATCGCAAAC | 59.23 | GTCATCCTAAACGCTGTCGT | 57.824 | 207 | (GAA)4 |
| 145 | Contig1123 | GACTCCACCAACCAACACTC | 57.948 | CAGTTGGACCACCAGTAACC | 57.901 | 395 | (AAT)5 |
| 146 | Contig1126 | CCGCTAACAATCACTTCACC | 58.228 | TACATGTGTAACTGTGGGCG | 58.057 | 419 | (ATA)5 |
| 147 | Contig1138 | CGTCTTGCAGGATGAAGTCT | 58.029 | GAGACCCGACAGATTGATTG | 58.071 | 464 | (ATT)4 |
| 148 | Contig1139 | CTCTTCTTCCATCTCACCCA | 57.78 | CCGACTCCTTCTTGAACAGA | 58.001 | 229 | (GAA)4 |
| 149 | Contig1146 | CCGAGTGAGTAGACCCAGAA | 57.871 | ACTGAGTCAACCCGGTCATA | 58 | 167 | (TAT)4 |
| 150 | Contig1146 | GTATGACCGGGTTGACTCAG | 58 | TGGTTCACACCCTCTGTTCT | 58.113 | 383 | (ATGGTC)6 |
| 151 | Contig1158 | GGGAGGATTAAAGGATCTCG | 57.675 | CGCTCAACCAGTTTAGCATC | 58.529 | 414 | (TC)8 |
| 152 | Contig1173 | CGGACCAAACGAAGAACA | 58.156 | CCACCTGATTATTCGACGAC | 58.019 | 221 | (TCT)4 |
| 153 | Contig1175 | CAACCCCAATTATACCCCTC | 58.11 | TAACACGTGGGTAACACCCT | 57.856 | 338 | (CAG)4 |
| 154 | Contig1189 | ACTCAGGCATCTGATCATGG | 58.616 | TCAGTTTCTTGCCCTGCTAC | 58.104 | 279 | (TCT)4 |
| 155 | Contig1197 | ATACAGGTCACTGGCTCTCG | 57.9 | CCTAGGAGAACCCCACTTGT | 58.106 | 403 | (GAA)5 |
| 156 | Contig1199 | ACCTAAACACACCGAGTCCA | 58.059 | GCAACGAGTTCAGACCACTC | 58.436 | 213 | (TCC)4 |
| 157 | Contig1202 | TAAGACGGAGCACAAGGAAG | 58.105 | ATAACAGCTCTGCCTTCACG | 58.132 | 196 | (AGC)4 |
| 158 | Contig1211 | TTACTTAAGCCCTGTCGTGG | 57.907 | GGATCAGAACCTTCATGCAC | 58.07 | 216 | (CAGGTT)4 |
| 159 | Contig1231 | TGCTCACCAGGTTAGGTGTT | 58.215 | GCTCTCAAGTTACTGCAGCC | 57.853 | 314 | (TTA)4 |
| 160 | Contig1233 | TGTGTGCTCTACGAACCAGA | 57.977 | CCTCTTAACCAGAGGCACAA | 57.952 | 498 | (ATG)5 |
| 161 | Contig1234 | GAACATCTGCAAACCCTAGC | 57.419 | CACCACTGTTATCAGCACCA | 58.112 | 454 | (CAT)4 |
| 162 | Contig1248 | GTTCTGGTGTTGATGGGAGA | 58.482 | ATCTCCACCATCCTTCCTCT | 57.555 | 480 | (ATG)5 |
| 163 | Contig1249 | GATGGCTATGTCTATGGCGA | 58.699 | GCTTCTCTAGTTCGCAGTCG | 58.008 | 284 | (TCC)4 |
| 164 | Contig1255 | GGAATCTCTGACCAATCCCT | 57.964 | CCACACACCTTCACAACTCA | 58.063 | 442 | (TAT)4 |
| 165 | Contig1260 | CAACCCTTGTGACCCACTAC | 57.901 | ACAGCCACCACTCTAACCAC | 57.639 | 384 | (GA)8 |
| 166 | Contig1264 | TACACCTTCACCCACTCCAT | 57.84 | AAACATAGACTCGAACCCCC | 57.974 | 467 | (AAT)4 |
| 167 | Contig1276 | ACCACCACATACACCACACA | 58.062 | CGGGTTTGCTGACTTACACT | 57.884 | 450 | (TAT)4 |
| 168 | Contig1277 | GTTATCCCATGGAAAGACCC | 58.16 | GAACCTCTTAACCGCTCTCC | 58.001 | 351 | (ACC)5 |
| 169 | Contig1278 | GGAAGTCTTACGTGTCACCG | 58.215 | GATTCAGGATTCAGGTCACG | 58.071 | 190 | (TTA)4 |
| 170 | Contig1279 | CTGGATGTTGAGATCCGACT | 57.647 | GTTACACCCAGGTTGGTCTG | 57.901 | 228 | (CAA)4 |
| 171 | Contig1279 | CGGAGTGAAGCTACAAGGAA | 58.105 | CAGACAACCCTGTTGAAACC | 58.03 | 194 | (AAT)5 |
| 172 | Contig1286 | GAGTTGGAGGGGTTCTTGTT | 58.078 | GTCTTCAGGATGCACCATTC | 58.07 | 231 | (CTC)4 |
| 173 | Contig1303 | CACGTTGTAAGCACGTCATC | 57.764 | TAGGGCTTGTGTGACCACTT | 58.215 | 495 | (TGTA)4 |
| 174 | Contig1307 | CCTTGCTCCAGTGTCTTGTA | 56.46 | TAAGTTAGCCCGTTGTCGAG | 58.054 | 444 | (CAG)4 |
| 175 | Contig1307 | TCGACAACGGGCTAACTTAC | 57.906 | CTTGTAGTGCATTTCCCACC | 58.076 | 472 | (CCT)4 |
| 176 | Contig1313 | CGAAGGAGAAGACTCCACAA | 58.001 | CACCTTCCTGAATGATCTGG | 58.071 | 443 | (CAA)5 |
| 177 | Contig1316 | CATCGATCGGAACTGCTAAC | 58.326 | CTTCCTTCTTCACTGGCGTA | 58.105 | 195 | (AAC)5 |
| 178 | Contig1318 | TTTCTATCGAGGGAAGGAGG | 58.333 | GCCTTCTGTCAAACACTGCT | 58.087 | 425 | (GAT)4 |
| 179 | Contig1333 | GGGTACAGAAACCAACCGAT | 58.766 | AGCACTGACGACTAACCCAC | 57.8 | 142 | (CAA)5 |
| 180 | Contig1354 | AGAAGAGCCTCCACAAACCT | 57.982 | CATCACCGTCATCACCAGTA | 57.883 | 262 | (AAG)4 |
| 181 | Contig1358 | ACTCTTCGCCTTTGATCCTC | 58.473 | CTACAGCCAAGGAATGTGCT | 57.98 | 377 | (CTT)4 |
| 182 | Contig1376 | TGACTGTATGGAGACGGAGC | 58.83 | CATCGATACACCGATCTTCC | 57.961 | 119 | (CGC)4 |
| 183 | Contig1379 | TCTTCCCCTCCATATCACAC | 57.357 | TCTGAGAACAGAGGACAGGG | 57.919 | 123 | (ATT)5 |
| 184 | Contig1381 | AAAAGAGGAACGAGGAGTGG | 58.376 | TGTCCTGAGCCTCATACTCC | 57.809 | 132 | (GAA)4 |
| 185 | Contig1384 | ACACAGGATCAACCCAGCTA | 58.158 | GAACAGGAGGCTGTTGAAGA | 58 | 289 | (CA)7 |
| 186 | Contig1394 | AGAGGCTAAAGAACCCGAAG | 57.697 | CCAACCAGATCCACAAGAAG | 58.13 | 155 | (TGCA)4 |
| 187 | Contig1397 | GGAACCTCAGGGTTACGAAT | 57.974 | ACCAGAGTCTCCCTCTGCTT | 58.06 | 379 | (GAA)5 |
| 188 | Contig1403 | CACCCTTACAACCAGACACC | 57.901 | GTGCTCCATATAATCCCCCT | 57.82 | 339 | (CGA)5 |
| 189 | Contig1407 | GCTTACCGTCATTCACTGCT | 57.979 | GTAGGTGTAATGTGGGGGTG | 57.641 | 444 | (CAC)4 |
| 190 | Contig1426 | GGTAACACCACCATCAGGAG | 57.84 | CAAGTGTAACCAGGAGGTGG | 58.059 | 324 | (CCA)4 |
| 191 | Contig1459 | CATAACCCAAGTTCTGGTGG | 57.924 | GAGCTGAATCTTTCGCTCTG | 57.922 | 377 | (CTT)5 |
| 192 | Contig1481 | GCAGATGGTCAGATTCATCC | 58.01 | CAGTCGGAGTAAACCCTGAA | 57.799 | 355 | (AGA)4 |
| 193 | Contig1493 | CCGATCCTTCTCTCTCCTTC | 57.993 | CTCTTGAGAAGCATCACGGT | 58.029 | 278 | (AAG)4 |
| 194 | Contig1494 | GAAGAAAGAGGTAGACCGGG | 57.854 | ACCCCAACACGACTGTTTAC | 57.417 | 245 | (TAA)4 |
| 195 | Contig1501 | ATTCAGCGTCTGCTAGCCT | 57.809 | GATGGTGATCTCATGGAAGC | 58.01 | 328 | (TTC)4 |
| 196 | Contig1503 | CTCTAACTTTGGACGACGAC | 55.024 | TGAACATGAGCCTCCTTAGC | 58.048 | 334 | (CTT)4 |
| 197 | Contig1503 | GCTAAGGAGGCTCATGTTCA | 58.048 | ACATTCATCCCCTCCTCTTC | 57.964 | 260 | (TCT)4 |
| 198 | Contig1525 | TGGACTGAGGGCATTATAGC | 57.791 | AAACCACTTCTCACAGCAGC | 58.087 | 181 | (CTG)4 |

TABLE 12
SSRs and SSR Primer Sequences from Singletons and Annealing Temperatures.

| Sequence ID | Contig |
|---|---|
| 1 | gi\|294712248\|gb\|GW780481.1\|GW780481_PBC024E10_04909_Parthenium_ |
| | argentatum_cold_acclimated_bark_cDNA_library_(PBC)_Parthenium_argentatum_ |
| | cDNA_clone_PBC024E10,_mRNA_sequence |
| 2 | gi\|294712235\|gb\|GW780468.1\|GW780468_PBC024D07_04896_Parthenium_ |
| | argentatum_cold_acclimated_bark_cDNA_library_(PBC)_Parthenium_argentatum_ |
| | cDNA_clone_PBC024D07,_mRNA_sequence |
| 3 | gi\|294712234\|gb\|GW780467.1\|GW780467_PBC024D06_04895_Parthenium_ |
| | argentatum_cold_acclimated_bark_cDNA_library_(PBC)_Parthenium_argentatum_ |
| | cDNA_clone_PBC024D06,_mRNA_sequence |
| 4 | gi\|294712199\|gb\|GW780432.1\|GW780432_PBC024A07_04860_Parthenium_ |
| | argentatum_cold_acclimated_bark_cDNA_library_(PBC)_Parthenium_argentatum_ |
| | cDNA_clone_PBC024A07,_mRNA_sequence |
| 5 | gi\|294711956\|gb\|GW780431.1\|GW780431_PBC024A06_04859_Parthenium_ |
| | argentatum_cold_acclimated_bark_cDNA_library_(PBC)_Parthenium_argentatum_ |
| | cDNA_clone_PBC024A06,_mRNA_sequence |
| 6 | gi\|294711943\|gb\|GW780418.1\|GW780418_PBC023H05_04806_Parthenium_ |
| | argentatum_cold_acclimated_bark_cDNA_library_(PBC)_Parthenium_argentatum_ |
| | cDNA_clone_PBC023H05,_mRNA_sequence |
| 7 | gi\|294711919\|gb\|GW780394.1\|GW780394_PBC023F05_04822_Parthenium_ |
| | argentatum_cold_acclimated_bark_cDNA_library_(PBC)_Parthenium_argentatum_ |
| | cDNA_clone_PBC023F05,_mRNA_sequence |
| 8 | gi\|294711892\|gb\|GW780367.1\|GW780367_PBC023D02_04795_Parthenium_ |
| | argentatum_cold_acclimated_bark_cDNA_library_(PBC)_Parthenium_argentatum_ |
| | cDNA_clone_PBC023D02,_mRNA_sequence |
| 9 | gi\|294711892\|gb\|GW780367.1\|GW780367_PBC023D02_04795_Parthenium_ |
| | argentatum_cold_acclimated_bark_cDNA_library_(PBC)_Parthenium_argentatum_ |
| | cDNA_clone_PBC023D02,_mRNA_sequence |
| 10 | gi\|294711884\|gb\|GW780359.1\|GW780359_PBC023C05_04787_Parthenium_ |
| | argentatum_cold_acclimated_bark_cDNA_library_(PBC)_Parthenium_argentatum_ |
| | cDNA_clone_PBC023C05,_mRNA_sequence |
| 11 | gi\|294711624\|gb\|GW780341.1\|GW780341_PBC023A10_04_769_Parthenium_ |
| | argentatum_cold_acclimated_bark_cDNA_library_(PBC)_Parthenium_argentatum_ |
| | cDNA_clone_PBC023A10,_mRNA_sequence |
| 12 | gi\|294711616\|gb\|GW780333.1\|GW780333_PBC023A02_04761_Parthenium_ |
| | argentatum_cold_acclimated_bark_cDNA_library_(PBC)_Parthenium_argentatum_ |
| | cDNA_clone_PBC023A02,_mRNA_sequence |
| 13 | gi\|294711596\|gb\|GW780313.1\|GW780313_PBC022G05_04741_Parthenium_ |
| | argentatum_cold_acclimated_bark_cDNA_library_(PBC)_Parthenium_argentatum_ |
| | cDNA_clone_PBC022G05,_mRNA_sequence |
| 14 | gi\|294711564\|gb\|GW780281.1\|GW780281_PBC022D08_04709_Parthenium_ |
| | argentatum_cold_acclimated_bark_cDNA_library_(PBC)_Parthenium_argentatum_ |
| | cDNA_clone_PBC022D08,_mRNA_sequence |
| 15 | gi\|294711309\|gb\|GW780268.1\|GW780268_PBC022C05_04696_Parthenium_ |
| | argentatum_cold_acclimated_bark_cDNA_library_(PBC)_Parthenium_argentatum_ |
| | cDNA_clone_PBC022C05,_mRNA_sequence |
| 16 | gi\|294711292\|gb\|GW780251.1\|GW780251_PBC022A12_04679_Parthenium_ |
| | argentatum_cold_acclimated_bark_cDNA_library_(PBC)_Parthenium_argentatum_ |
| | cDNA_clone_PBC022A12,_mRNA_sequence |
| 17 | gi\|294711289\|gb\|GW780248.1\|GW780248_PBC022A09_04676_Parthenium_ |
| | argentatum_cold_acclimated_bark_cDNA_library_(PBC)_Parthenium_argentatum_ |
| | cDNA_clone_PBC022A09,_mRNA_sequence |
| 18 | gi\|294711254\|gb\|GW780213.1\|GW780213_PBC021F10_04641_Parthenium_ |
| | argentatum_cold_acclimated_bark_cDNA_library_(PBC)_Parthenium_argentatum_ |
| | cDNA_clone_PBC021F10,_mRNA_sequence |
| 19 | gi\|294711242\|gb\|GW780201.1\|GW780201_PBC021E10_04629_Parthenium_ |
| | argentatum_cold_acclimated_bark_cDNA_library_(PBC)_Parthenium_argentatum_ |
| | cDNA_clone_PBC021E10,_mRNA_sequence |
| 20 | gi\|294710969\|gb\|GW780170.1\|GW780170_PBC021C02_04598_Parthenium_ |
| | argentatum_cold_acclimated_bark_cDNA_library_(PBC)_Parthenium_argentatum_ |
| | cDNA_clone_PBC021C02,_mRNA_sequence |
| 21 | gi\|294710966\|gb\|GW780167.1\|GW780167_PBC021B11_04595_Parthenium_ |
| | argentatum_cold_acclimated_bark_cDNA_library_(PBC)_Parthenium_argentatum_ |
| | cDNA_clone_PBC021B11,_mRNA_sequence |
| 22 | gi\|294710923\|gb\|GW780124.1\|GW780124_PBC020G04_04552_Parthenium_ |
| | argentatum_cold_acclimated_bark_cDNA_library_(PBC)_Parthenium_argentatum_ |
| | cDNA_clone_PBC020G04,_mRNA_sequence |
| 23 | gi\|294710668\|gb\|GW780111.1\|GW780111_PBC020F03_04539_Parthenium_ |
| | argentatum_cold_acclimated_bark_cDNA_library_(PBC)_Parthenium_argentatum_ |
| | cDNA_clone_PBC020F03,_mRNA_sequence |
| 24 | gi\|294710659\|gb\|GW780102.1\|GW780102_PBC020E05_04530_Parthenium_ |
| | argentatum_cold_acclimated_bark_cDNA_library_(PBC)_Parthenium_argentatum_ |
| | cDNA_clone_PBC020E05,_mRNA_sequence |
| 25 | gi\|294710641\|gb\|GW780084.1\|GW780084_PBC020C11_04512_Parthenium_ |
| | argentatum_cold_acclimated_bark_cDNA_library_(PBC)_Parthenium_argentatum_ |
| | cDNA_clone_PBC020C11,_mRNA_sequence |
| 26 | gi\|294710624\|gb\|GW780067.1\|GW780067_PBC020B05_04495_Parthenium_ |
| | argentatum_cold_acclimated_bark_cDNA_library_(PBC)_Parthenium_argentatum_ |
| | cDNA_clone_PBC020B05,_mRNA_sequence |
| 27 | gi\|294710602\|gb\|GW780045.1\|GW780045_PBC019H04_04473_Parthenium_ |
| | argentatum_cold_acclimated_bark_cDNA_library_(PBC)_Parthenium_argentatum_ |
| | cDNA_clone_PBC019H04,,_mRNA_sequence |
| 28 | gi\|294710597\|gb\|GW780040.1\|GW780040_PBC019G11_04468_Parthenium_ |
| | argentatum_cold_acclimated_bark_cDNA_library_(PBC)_Parthenium_argentatum_ |
| | cDNA_clone_PBC019G11,_mRNA_sequence |
| 29 | gi\|294710331\|gb\|GW780016.1\|GW780016_PBC019E11_04444_Parthenium_ |
| | argentatum_cold_acclimated_bark_cDNA_library_(PBC)_Parthenium_argentatum_ |
| | cDNA_clone_PBC019E11,_mRNA_sequence |
| 30 | gi\|294710302\|gb\|GW779987.1\|GW779987_PBC019C04_04415_Parthenium_ |
| | argentatum_cold_acclimated_bark_cDNA_library_(PBC)_Parthenium_argentatum_ |
| | cDNA_clone_PBC019C04,_mRNA_sequence |
| 31 | gi\|294710293\|gb\|GW779978.1\|GW779987_PBC019B06_04406_Parthenium_ |
| | argentatum_cold_acclimated_bark_cDNA_library_(PBC)_Parthenium_argentatum_ |
| | cDNA_clone_PBC019B06,_mRNA_sequence |
| 32 | gi\|294710290\|gb\|GW779975.1\|GW779975_PBC019B03_04403_Parthenium_ |
| | argentatum_cold_acclimated_bark_cDNA_library_(PBC)_Parthenium_argentatum_ |
| | cDNA_clone_PBC019B03,_mRNA_sequence |
| 33 | gi\|294710029\|gb\|GW779956.1\|GW779956_PBC018H08_04384_Parthenium_ |
| | argentatum_cold_acclimated_bark_cDNA_library_(PBC)_Parthenium_argentatum_ |
| | cDNA_clone_PBC018H08,_mRNA_sequence |
| 34 | gi\|294710004\|gb\|GW779931.1\|GW779931_PBC018F06_04359_Parthenium_ |
| | argentatum_cold_acclimated_bark_cDNA_library_(PBC)_Parthenium_argentatum_ |
| | cDNA_clone_PBC018F06,_mRNA_sequence |
| 35 | gi\|29470997\|gb\|GW779903.1\|GW779903_PBC018D02_04331_Parthenium_ |
| | argentatum_cold_acclimated_bark_cDNA_library_(PBC)_Parthenium_argentatum_ |
| | cDNA_clone_PBC018D02,_mRNA_sequence |
| 36 | gi\|294709860\|gb\|GW777341.1\|GW777341_PAB921A03_01769_Parthenium_ |
| | argentatum_cold_acclimated_bark_cDNA_library_(PAB)_Parthenium_argentatum_ |
| | cDNA_clone_PAB921A03,_mRNA_sequence |
| 37 | gi\|294709847\|gb\|GW777328.1\|GW777328_PAB921E06_01756_Parthenium_ |
| | argentatum_cold_acclimated_bark_cDNA_library_(PAB)_Parthenium_argentatum_ |
| | cDNA_clone_PAB921A03,_mRNA_sequence |
| 38 | gi\|294709845\|gb\|GW777326.1\|GW777326_PAB921H08_01754_Parthenium_ |
| | argentatum_cold_acclimated_bark_cDNA_library_(PAB)_Parthenium_argentatum_ |
| | cDNA_clone_PAB921H08,_mRNA_sequence |
| 39 | gi\|294709828\|gb\|GW779309.1\|GW777309_PAB921H01_01737_Parthenium_ |
| | argentatum_cold_acclimated_bark_cDNA_library_(PAB)_Parthenium_argentatum_ |
| | cDNA_clone_PAB921H01,_mRNA_sequence |
| 40 | gi\|294709779\|gb\|GW777260.1\|GW777260_PAB921B01_01688_Parthenium_ |
| | argentatum_cold_acclimated_bark_cDNA_library_(PAB)_Parthenium_argentatum_ |
| | cDNA_clone_PAB921B01,_mRNA_sequence |
| 41 | gi\|294709686\|gb\|GW777175.1\|GW777175_PAB917E10_01603_Parthenium_ |
| | argentatum_cold_acclimated_bark_cDNA_library_(PAB)_Parthenium_argentatum_ |
| | cDNA_clone_PAB917E10,_mRNA_sequence |
| 42 | gi\|294709672\|gb\|GW777161.1\|GW777161_PAB920C05_01589_Parthenium_ |
| | argentatum_cold_acclimated_bark_cDNA_library_(PAB)_Parthenium_argentatum_ |
| | cDNA_clone_PAB920C05,_mRNA_sequence |
| 43 | gi\|294709660\|gb\|GW777149.1\|GW777149_PAB920A04_01577_Parthenium_ |
| | argentatum_cold_acclimated_bark_cDNA_library_(PAB)_Parthenium_argentatum_ |
| | cDNA_clone_PAB920A04,_mRNA_sequence |
| 44 | gi\|294709646\|gb\|GW777132.1\|GW777135_PAB920E07_01563_Parthenium_ |
| | argentatum_cold_acclimated_bark_cDNA_library_(PAB)_Parthenium_argentatum_ |
| | cDNA_clone_PAB920E07,_mRNA_sequence |
| 45 | gi\|294709578\|gb\|GW777067.1\|GW777067_PAB916D04_01495_Parthenium_ |
| | argentatum_cold_acclimated_bark_cDNA_library_(PAB)_Parthenium_argentatum_ |
| | cDNA_clone_PAB916D04,_mRNA_sequence |
| 46 | gi\|294709568\|gb\|GW777057.1\|GW777057_PAB916F08_01485_Parthenium_ |
| | argentatum_cold_acclimated_bark_cDNA_library_(PAB)_Parthenium_argentatum_ |
| | cDNA_clone_PAB916F08,_mRNA_sequence |
| 47 | gi\|294709553\|gb\|GW777042.1\|GW777042_PAB916F10_01470_Parthenium_ |
| | argentatum_cold_acclimated_bark_cDNA_library_(PAB)_Parthenium_argentatum_ |
| | cDNA_clone_PAB916F10,_mRNA_sequence |
| 48 | gi\|29470954\|gb\|GW777030.1\|GW777030_PAB916A12_01458_Parthenium_ |
| | argentatum_cold_acclimated_bark_cDNA_library_(PAB)_Parthenium_argentatum_ |
| | cDNA_clone_PAB916A12,_mRNA_sequence |
| 49 | gi\|294709524\|gb\|GW777013.1\|GW777013_PAB916D03_01441_Parthenium_ |
| | argentatum_cold_acclimated_bark_cDNA_library_(PAB)_Parthenium_argentatum_ |
| | cDNA_clone_PAB916D03,_mRNA_sequence |
| 50 | gi\|294709520\|gb\|GW777009.1\|GW777009_PAB916D12_01437_Parthenium_ |
| | argentatum_cold_acclimated_bark_cDNA_library_(PAB)_Parthenium_argentatum_ |
| | cDNA_clone_PAB916D12,_mRNA_sequence |
| 51 | gi\|294709515\|gb\|GW777004.1\|GW777004_PAB916B07_01432_Parthenium_ |
| | argentatum_cold_acclimated_bark_cDNA_library_(PAB)_Parthenium_argentatum_ |
| | cDNA_clone_PAB916B07,_mRNA_sequence |
| 52 | gi\|294709515\|gb\|GW777004.1\|GW777004_PAB916B07_01432_Parthenium_ |
| | argentatum_cold_acclimated_bark_cDNA_library_(PAB)_Parthenium_argentatum_ |
| | cDNA_clone_PAB916B07,_mRNA_sequence |
| 53 | gi\|294709510\|gb\|GW776999.1\|GW776999_PAB916H06_01427_Parthenium_ |
| | argentatum_cold_acclimated_bark_cDNA_library_(PAB)_Parthenium_argentatum_ |
| | cDNA_clone_PAB916H06,_mRNA_sequence |
| 54 | gi\|294709468\|gb\|GW776957.1\|GW776957_PAB915H08_01385_Parthenium_ |
| | argentatum_cold_acclimated_bark_cDNA_library_(PAB)_Parthenium_argentatum_ |
| | cDNA_clone_PAB915H08,_mRNA_sequence |
| 55 | gi\|294709448\|gb\|GW776937.1\|GW776937_PAB915D01_01365_Parthenium_ |
| | argentatum_cold_acclimated_bark_cDNA_library_(PAB)_Parthenium_argentatum_ |
| | cDNA_clone_PAB915D01,_mRNA_sequence |
| 56 | gi\|294709422\|gb\|GW776911.1\|GW776911_PAB915C10_01339_Parthenium_ |
| | argentatum_cold_acclimated_bark_cDNA_library_(PAB)_Parthenium_argentatum_ |
| | cDNA_clone_PAB915C10,_mRNA_sequence |
| 57 | gi\|294709394\|gb\|GW776883.1\|GW776883_PAB919E03_01311_Parthenium_ |
| | argentatum_cold_acclimated_bark_cDNA_library_(PAB)_Parthenium_argentatum_ |
| | cDNA_clone_PAB919E03,_mRNA_sequence |
| 58 | gi\|294709386\|gb\|GW776875.1\|GW776875_PAB919G02_01303_Parthenium_ |
| | argentatum_cold_acclimated_bark_cDNA_library_(PAB)_Parthenium_argentatum_ |
| | cDNA_clone_PAB919G02,_mRNA_sequence |
| 59 | gi\|294709361\|gb\|GW776850.1\|GW776850_PAB919F02_01278_Parthenium_ |
| | argentatum_cold_acclimated_bark_cDNA_library_(PAB)_Parthenium_argentatum_ |
| | cDNA_clone_PAB919F02,_mRNA_sequence |
| 60 | gi\|294709355\|gb\|GW776844.1\|GW776844_PAB919H01_01272_Parthenium_ |
| | argentatum_cold_acclimated_bark_cDNA_library_(PAB)_Parthenium_argentatum_ |
| | cDNA_clone_PAB919H01,_mRNA_sequence |
| 61 | gi\|294709355\|gb\|GW776844.1\|GW776844_PAB919H01_01272_Parthenium_ |
| | argentatum_cold_acclimated_bark_cDNA_library_(PAB)_Parthenium_argentatum_ |
| | cDNA_clone_PAB919H01,_mRNA_sequence |
| 62 | gi\|294709292\|gb\|GW776781.1\|GW776781_PAB918F07_01209_Parthenium_ |
| | argentatum_cold_acclimated_bark_cDNA_library_(PAB)_Parthenium_argentatum_ |
| | cDNA_clone_PAB918F07,_mRNA_sequence |
| 63 | gi\|294709291\|gb\|GW776780.1\|GW776780_PAB915F11_01208_Parthenium_ |
| | argentatum_cold_acclimated_bark_cDNA_library_(PAB)_Parthenium_argentatum_ |
| | cDNA_clone_PAB918F11,_mRNA_sequence |
| 64 | gi\|294709274\|gb\|GW776763.1\|GW776763_PAB918C08_01191_Parthenium_ |
| | argentatum_cold_acclimated_bark_cDNA_library_(PAB)_Parthenium_argentatum_ |
| | cDNA_clone_PAB918C08,_mRNA_sequence |
| 65 | gi\|294709113\|gb\|GW783004.1\|GW783004_PBC052F11_07432_Parthenium_ |
| | argentatum_cold_acclimated_bark_cDNA_library_(PBC)_Parthenium_argentatum_ |
| | cDNA_clone_PBC052F11,_mRNA_sequence |
| 66 | gi\|294709108\|gb\|GW782999.1\|GW782999_PBC052F06_07427_Parthenium_ |
| | argentatum_cold_acclimated_bark_cDNA_library_(PBC)_Parthenium_argentatum_ |
| | cDNA_clone_PBC052F06,_mRNA_sequence |
| 67 | gi\|294709094\|gb\|GW782985.1\|GW782985_PBC052E05_07413_Parthenium_ |
| | argentatum_cold_acclimated_bark_cDNA_library_(PBC)_Parthenium_argentatum_ |
| | cDNA_clone_PBC052E05,_mRNA_sequence |
| 68 | gi\|294709089\|gb\|GW782980.1\|GW782980_PBC052D10_07408_Parthenium_ |
| | argentatum_cold_acclimated_bark_cDNA_library_(PBC)_Parthenium_argentatum_ |
| | cDNA_clone_PBC052D10,_mRNA_sequence |
| 69 | gi\|294708962\|gb\|GW782935.1\|GW782935_PBC051H08_07363_Parthenium_ |
| | argentatum_cold_acclimated_bark_cDNA_library_(PBC)_Parthenium_argentatum_ |
| | cDNA_clone_PBC051H08,_mRNA_sequence |
| 70 | gi\|294708913\|gb\|GW782886.1\|GW782886_PBC051D05_07314_Parthenium_ |
| | argentatum_cold_acclimated_bark_cDNA_library_(PBC)_Parthenium_argentatum_ |
| | cDNA_clone_PBC051D05,_mRNA_sequence |
| 71 | gi\|294708913\|gb\|GW782886.1\|GW782886_PBC051D05_07314_Parthenium_ |
| | argentatum_cold_acclimated_bark_cDNA_library_(PBC)_Parthenium_argentatum_ |
| | cDNA_clone_PBC051D05,_mRNA_sequence |
| 72 | gi\|294708812\|gb\|GW782867.1\|GW782867_PBC051B06_07295_Parthenium_ |
| | argentatum_cold_acclimated_bark_cDNA_library_(PBC)_Parthenium_argentatum_ |
| | cDNA_clone_PBC051B06,_mRNA_sequence |
| 73 | gi\|294708802\|gb\|GW782857.1\|GW782857_PBC051A08_07285_Parthenium_ |
| | argentatum_cold_acclimated_bark_cDNA_library_(PBC)_Parthenium_argentatum_ |
| | cDNA_clone_PBC051A08,_mRNA_sequence |
| 74 | gi\|294708796\|gb\|GW782851.1\|GW782851_PBC051A05_07279_Parthenium_ |
| | argentatum_cold_acclimated_bark_cDNA_library_(PBC)_Parthenium_argentatum_ |
| | cDNA_clone_PBC051A05,_mRNA_sequence |
| 75 | gi\|294708654\|gb\|GW782279.1\|GW782791_PBC050C11_07219_Parthenium_ |
| | argentatum_cold_acclimated_bark_cDNA_library_(PBC)_Parthenium_argentatum_ |
| | cDNA_clone_PBC050C11,_mRNA_sequence |
| 76 | gi\|294708635\|gb\|GW782772.1\|GW782772_PBC050B05_07200_Parthenium_ |
| | argentatum_cold_acclimated_bark_cDNA_library_(PBC)_Parthenium_argentatum_ |
| | cDNA_clone_PBC050B05,_mRNA_sequence |
| 77 | gi\|294708630\|gb\|GW782767.1\|GW782767_PBC050A11_07195_Parthenium_ |
| | argentatum_cold_acclimated_bark_cDNA_library_(PBC)_Parthenium_argentatum_ |
| | cDNA_clone_PBC050A11,_mRNA_sequence |
| 78 | gi\|294708611\|gb\|GW782748.1\|GW782748_PBC049H04_07176_Parthenium_ |
| | argentatum_cold_acclimated_bark_cDNA_library_(PBC)_Parthenium_argentatum_ |
| | cDNA_clone_PBC049H04,_mRNA_sequence |
| 79 | gi\|294708499\|gb\|GW782718.1\|GW782718_PBC049E06_07146_Parthenium_ |
| | argentatum_cold_acclimated_bark_cDNA_library_(PBC)_Parthenium_argentatum_ |
| | cDNA_clone_PBC049E06,_mRNA_sequence |
| 80 | gi\|294708474\|gb\|GW782693.1\|GW782693_PBC049C05_07121_Parthenium_ |
| | argentatum_cold_acclimated_bark_cDNA_library_(PBC)_Parthenium_argentatum_ |
| | cDNA_clone_PBC049C05,_mRNA_sequence |
| 81 | gi\|294708471\|gb\|GW782690.1\|GW782690_PBC049C04_07118_Parthenium_ |
| | argentatum_cold_acclimated_bark_cDNA_library_(PBC)_Parthenium_argentatum_ |
| | cDNA_clone_PBC049C04,_mRNA_sequence |
| 82 | gi\|294708461\|gb\|GW782680.1\|GW782680_PBC049B04_07108_Parthenium_ |
| | argentatum_cold_acclimated_bark_cDNA_library_(PBC)_Parthenium_argentatum_ |
| | cDNA_clone_PBC049B04,_mRNA_sequence |
| 83 | gi\|294708450\|gb\|GW782669.1\|GW782669_PBC049A04_07097_Parthenium_ |
| | argentatum_cold_acclimated_bark_cDNA_library_(PBC)_Parthenium_argentatum_ |
| | cDNA_clone_PBC049A04,_mRNA_sequence |
| 84 | gi\|294708436\|gb\|GW782655.1\|GW782655_PBC048G09_07083_Parthenium_ |
| | argentatum_cold_acclimated_bark_cDNA_library_(PBC)_Parthenium_argentatum_ |
| | cDNA_clone_PBC048G09,_mRNA_sequence |
| 85 | gi\|294708167\|gb\|GW782550.1\|GW782550_PBC047E11_06978_Parthenium_ |
| | argentatum_cold_acclimated_bark_cDNA_library_(PBC)_Parthenium_argentatum_ |
| | cDNA_clone_PBC047E11,_mRNA_sequence |
| 86 | gi\|294708158\|gb\|GW782541.1\|GW782541_PBC047E04_06969_Parthenium_ |
| | argentatum_cold_acclimated_bark_cDNA_library_(PBC)_Parthenium_argentatum_ |
| | cDNA_clone_PBC047E04,_mRNA_sequence |
| 87 | gi\|294708131\|gb\|GW782514.1\|GW782514_PBC047B08_06942_Parthenium_ |
| | argentatum_cold_acclimated_bark_cDNA_library_(PBC)_Parthenium_argentatum_ |
| | cDNA_clone_PBC047B08,_mRNA_sequence |
| 88 | gi\|294707986\|gb\|GW782451.1\|GW782451_PBC047E04_06879_Parthenium_ |
| | argentatum_cold_acclimated_bark_cDNA_library_(PBC)_Parthenium_argentatum_ |
| | cDNA_clone_PBC046E04,_mRNA_sequence |
| 89 | gi\|294707981\|gb\|GW782446.1\|GW782446_PBC046D08_06874_Parthenium_ |
| | argentatum_cold_acclimated_bark_cDNA_library_(PBC)_Parthenium_argentatum_ |
| | cDNA_clone_PBC046D08,_mRNA_sequence |
| 90 | gi\|294707957\|gb\|GW782422.1\|GW782422_PBC047B06_06850_Parthenium_ |
| | argentatum_cold_acclimated_bark_cDNA_library_(PBC)_Parthenium_argentatum_ |
| | cDNA_clone_PBC046B06,_mRNA_sequence |
| 91 | gi\|294707950\|gb\|GW782415.1\|GW782415_PBC046A11_06843_Parthenium_ |
| | argentatum_cold_acclimated_bark_cDNA_library_(PBC)_Parthenium_argentatum_ |
| | cDNA_clone_PBC046A11,_mRNA_sequence |
| 92 | gi\|294705882\|gb\|GW779867.1\|GW779867_PBC017H12_04295_Parthenium_ |
| | argentatum_cold_acclimated_bark_cDNA_library_(PBC)_Parthenium_argentatum_ |
| | cDNA_clone_PBC017H12,_mRNA_sequence |
| 93 | gi\|294705836\|gb\|GW779821.1\|GW779821_PBC017E01_04249_Parthenium_ |
| | argentatum_cold_acclimated_bark_cDNA_library_(PBC)_Parthenium_argentatum_ |
| | cDNA_clone_PBC017E01,_mRNA_sequence |
| 94 | gi\|294705713\|gb\|GW779778.1\|GW779778_PBC017A05_04206_Parthenium_ |
| | argentatum_cold_acclimated_bark_cDNA_library_(PBC)_Parthenium_argentatum_ |
| | cDNA_clone_PBC017A05,_mRNA_sequence |
| 95 | gi\|294705712\|gb\|GW779777.1\|GW779777_PBC017A03_04205_Parthenium_ |
| | argentatum_cold_acclimated_bark_cDNA_library_(PBC)_Parthenium_argentatum_ |
| | cDNA_clone_PBC017A03,_mRNA_sequence |
| 96 | gi\|294705671\|gb\|GW779736.1\|GW779736_PBC016E09_04164_Parthenium_ |
| | argentatum_cold_acclimated_bark_cDNA_library_(PBC)_Parthenium_argentatum_ |
| | cDNA_clone_PBC016E09,_mRNA_sequence |
| 97 | gi\|294705562\|gb\|GW779707.1\|GW779707_PBC016C02_04135_Parthenium_ |
| | argentatum_cold_acclimated_bark_cDNA_library_(PBC)_Parthenium_argentatum_ |
| | cDNA_clone_PBC016C02,_mRNA_sequence |
| 98 | gi\|294705547\|gb\|GW779692.1\|GW779692_PBC016A11_04120_Parthenium_ |
| | argentatum_cold_acclimated_bark_cDNA_library_(PBC)_Parthenium_argentatum_ |
| | cDNA_clone_PBC016A11,_mRNA_sequence |
| 99 | gi\|294705520\|gb\|GW779665.1\|GW779665_PBC015G05_04093_Parthenium_ |
| | argentatum_cold_acclimated_bark_cDNA_library_(PBC)_Parthenium_argentatum_ |
| | cDNA_clone_PBC015G05,_mRNA_sequence |
| 100 | gi\|294705513\|gb\|GW779658.1\|GW779658_PBC015F10_04086_Parthenium_ |
| | argentatum_cold_acclimated_bark_cDNA_library_(PBC)_Parthenium_argentatum_ |
| | cDNA_clone_PBC015F10,_mRNA_sequence |
| 101 | gi\|294705497\|gb\|GW779642.1\|GW779642_PBC015E06_04070_Parthenium_ |
| | argentatum_cold_acclimated_bark_cDNA_library_(PBC)_Parthenium_argentatum_ |
| | cDNA_clone_PBC015E06,_mRNA_sequence |
| 102 | gi\|294705339\|gb\|GW779634.1\|GW779634_PBC015D10_04062_Parthenium_ |
| | argentatum_cold_acclimated_bark_cDNA_library_(PBC)_Parthenium_argentatum_ |
| | cDNA_clone_PBC015D10,_mRNA_sequence |
| 103 | gi\|294705334\|gb\|GW779629.1\|GW779629_PBC015D05_04057_Parthenium_ |
| | argentatum_cold_acclimated_bark_cDNA_library_(PBC)_Parthenium_argentatum_ |
| | cDNA_clone_PBC015D05,_mRNA_sequence |
| 104 | gi\|294705323\|gb\|GW779618.1\|GW779618_PBC015C06_04046_Parthenium_ |
| | argentatum_cold_acclimated_bark_cDNA_library_(PBC)_Parthenium_argentatum_ |
| | cDNA_clone_PBC015C06,_mRNA_sequence |
| 105 | gi\|294705284\|gb\|GW779579.1\|GW779579_PBC014H03_04007_Parthenium_ |
| | argentatum_cold_acclimated_bark_cDNA_library_(PBC)_Parthenium_argentatum_ |
| | cDNA_clone_PBC014H03,_mRNA_sequence |
| 106 | gi\|294705282\|gb\|GW779577.1\|GW779577_PBC014H01_04005_Parthenium_ |
| | argentatum_cold_acclimated_bark_cDNA_library_(PBC)_Parthenium_argentatum_ |
| | cDNA_clone_PBC014H01,_mRNA_sequence |
| 107 | gi\|294705281\|gb\|GW779576.1\|GW779576_PBC014G12_04004_Parthenium_ |
| | argentatum_cold_acclimated_bark_cDNA_library_(PBC)_Parthenium_argentatum_ |
| | cDNA_clone_PBC014G12,_mRNA_sequence |
| 108 | gi\|294705090\|gb\|GW779545.1\|GW779545_PBC014E03_03973_Parthenium_ |
| | argentatum_cold_acclimated_bark_cDNA_library_(PBC)_Parthenium_argentatum_ |
| | cDNA_clone_PBC014E03,_mRNA_sequence |
| 109 | gi\|294705064\|gb\|GW779519.1\|GW779519_PBC014B11_03947_Parthenium_ |
| | argentatum_cold_acclimated_bark_cDNA_library_(PBC)_Parthenium_argentatum_ |
| | cDNA_clone_PBC014B11,_mRNA_sequence |
| 110 | gi\|294705052\|gb\|GW779507.1\|GW779507_PBC014A11_03935_Parthenium_ |
| | argentatum_cold_acclimated_bark_cDNA_library_(PBC)_Parthenium_argentatum_ |
| | cDNA_clone_PBC014B11,_mRNA_sequence |
| 111 | gi\|294705050\|gb\|GW779505.1\|GW779505_PBC014A09_03933_Parthenium_ |
| | argentatum_cold_acclimated_bark_cDNA_library_(PBC)_Parthenium_argentatum_ |
| | cDNA_clone_PBC014A09,_mRNA_sequence |
| 112 | gi\|294705032\|gb\|GW779487.1\|GW779487_PBC013H03_03915_Parthenium_ |
| | argentatum_cold_acclimated_bark_cDNA_library_(PBC)_Parthenium_argentatum_ |
| | cDNA_clone_PBC013H03,_mRNA_sequence |
| 113 | gi\|294704868\|gb\|GW779483.1\|GW779483_PBC013G10_03911_Parthenium_ |
| | argentatum_cold_acclimated_bark_cDNA_library_(PBC)_Parthenium_argentatum_ |
| | cDNA_clone_PBC013G10,_mRNA_sequence |
| 114 | gi\|294704861\|gb\|GW779476.1\|GW779476_PBC013G02_03904_Parthenium_ |
| | argentatum_cold_acclimated_bark_cDNA_library_(PBC)_Parthenium_argentatum_ |
| | cDNA_clone_PBC013G02,_mRNA_sequence |
| 115 | gi\|294704854\|gb\|GW779469.1\|GW779469_PBC013F07_03897_Parthenium_ |
| | argentatum_cold_acclimated_bark_cDNA_library_(PBC)_Parthenium_argentatum_ |
| | cDNA_clone_PBC013F07,_mRNA_sequence |
| 116 | gi\|294704603\|gb\|GW779378.1\|GW779378_PBC012F09_03806_Parthenium_ |
| | argentatum_cold_acclimated_bark_cDNA_library_(PBC)_Parthenium_argentatum_ |
| | cDNA_clone_PBC012F09,_mRNA_sequence |
| 117 | gi\|294704581\|gb\|GW779356.1\|GW779356_PBC012D10_03784_Parthenium_ |
| | argentatum_cold_acclimated_bark_cDNA_library_(PBC)_Parthenium_argentatum_ |
| | cDNA_clone_PBC012D10,_mRNA_sequence |
| 118 | gi\|294704578\|gb\|GW779353.1\|GW779353_PBC012D07_03781_Parthenium_ |
| | argentatum_cold_acclimated_bark_cDNA_library_(PBC)_Parthenium_argentatum_ |
| | cDNA_clone_PBC012D07,_mRNA_sequence |
| 119 | gi\|294704434\|gb\|GW779289.1\|GW779289_PBC011F10_03717_Parthenium_ |
| | argentatum_cold_acclimated_bark_cDNA_library_(PBC)_Parthenium_argentatum_ |
| | cDNA_clone_PBC011F10,_mRNA_sequence |
| 120 | gi\|294704432\|gb\|GW779287.1\|GW779287_PBC011F08_03715_Parthenium_ |
| | argentatum_cold_acclimated_bark_cDNA_library_(PBC)_Parthenium_argentatum_ |
| | cDNA_clone_PBC011F08,_mRNA_sequence |
| 121 | gi\|294704426\|gb\|GW779281.1\|GW779281_PBC011E12_03709_Parthenium_ |
| | argentatum_cold_acclimated_bark_cDNA_library_(PBC)_Parthenium_argentatum_ |
| | cDNA_clone_PBC011E12,_mRNA_sequence |
| 122 | gi\|294704425\|gb\|GW779280.1\|GW779280_PBC011E11_03708_Parthenium_ |
| | argentatum_cold_acclimated_bark_cDNA_library_(PBC)_Parthenium_argentatum_ |
| | cDNA_clone_PBC011E11,_mRNA_sequence |
| 123 | gi\|294704407\|gb\|GW779262.1\|GW779262_PBC011D04_03690_Parthenium_ |
| | argentatum_cold_acclimated_bark_cDNA_library_(PBC)_Parthenium_argentatum_ |
| | cDNA_clone_PBC011D04,_mRNA_sequence |
| 124 | gi\|294704403\|gb\|GW779258.1\|GW779258_PBC011C12_03686_Parthenium_ |
| | argentatum_cold_acclimated_bark_cDNA_library_(PBC)_Parthenium_argentatum_ |
| | cDNA_clone_PBC011C12,_mRNA_sequence |
| 125 | gi\|294704131\|gb\|GW777731.1\|GW777731_PAB926F11_02159_Parthenium_ |
| | argentatum_cold_acclimated_bark_cDNA_library_(PAB)_Parthenium_argentatum_ |
| | cDNA_clone_PAB926F11,_mRNA_sequence |
| 126 | gi\|294704126\|gb\|GW777726.1\|GW777726_PAB926B11_02154_Parthenium_ |
| | argentatum_cold_acclimated_bark_cDNA_library_(PAB)_Parthenium_argentatum_ |
| | cDNA_clone_PAB926B11,_mRNA_sequence |
| 127 | gi\|294702510\|gb\|GW775984.1\|GW775984_PAB905g09_00412_Parthenium_ |
| | argentatum_cold_acclimated_bark_cDNA_library_(PAB)_Parthenium_argentatum_ |
| | cDNA_clone_PAB905g09,_mRNA_sequence |
| 128 | gi\|294702508\|gb\|GW775982.1\|GW775982_PAB905c04_00410_Parthenium_ |
| | argentatum_cold_acclimated_bark_cDNA_library_(PAB)_Parthenium_argentatum_ |
| | cDNA_clone_PAB905c04,_mRNA_sequence |
| 129 | gi\|294702506\|gb\|GW775980.1\|GW775980_PAB905c09_00408_Parthenium_ |
| | argentatum_cold_acclimated_bark_cDNA_library_(PAB)_Parthenium_argentatum_ |
| | cDNA_clone_PAB905c09,_mRNA_sequence |
| 130 | gi\|294701675\|gb\|GW785540.1\|GW785540_PBC081B09_09968_Parthenium_ |
| | argentatum_cold_acclimated_bark_cDNA_library_(PBC)_Parthenium_argentatum_ |
| | cDNA_clone_PBC081B09,_mRNA_sequence |
| 131 | gi\|294701661\|gb\|GW785526.1\|GW785526_PBC081A06_09954_Parthenium_ |
| | argentatum_cold_acclimated_bark_cDNA_library_(PBC)_Parthenium_argentatum_ |
| | cDNA_clone_PBC081A06,_mRNA_sequence |
| 132 | gi\|294701631\|gb\|GW785496.1\|GW785496_PBC080F11_09924_Parthenium_ |
| | argentatum_cold_acclimated_bark_cDNA_library_(PBC)_Parthenium_argentatum_ |
| | cDNA_clone_PBC080F11,_mRNA_sequence |
| 133 | gi\|294701611\|gb\|GW785476.1\|GW785476_PBC080E05_09904_Parthenium_ |
| | argentatum_cold_acclimated_bark_cDNA_library_(PBC)_Parthenium_argentatum_ |
| | cDNA_clone_PBC080E05,_mRNA_sequence |
| 134 | gi\|294701562\|gb\|GW785427.1\|GW785427_PBC079H08_09855_Parthenium_ |
| | argentatum_cold_acclimated_bark_cDNA_library_(PBC)_Parthenium_argentatum_ |
| | cDNA_clone_PBC079H08,_mRNA_sequence |
| 135 | gi\|294701536\|gb\|GW785401.1\|GW785401_PBC079F05_09829_Parthenium_ |
| | argentatum_cold_acclimated_bark_cDNA_library_(PBC)_Parthenium_argentatum_ |
| | cDNA_clone_PBC079F05,_mRNA_sequence |
| 136 | gi\|294701532\|gb\|GW785397.1\|GW785397_PBC079E07_09825_Parthenium_ |
| | argentatum_cold_acclimated_bark_cDNA_library_(PBC)_Parthenium_argentatum_ |
| | cDNA_clone_PBC079E07,_mRNA_sequence |
| 137 | gi\|294701516\|gb\|GW785381.1\|GW785381_PBC079C09_09809_Parthenium_ |
| | argentatum_cold_acclimated_bark_cDNA_library_(PBC)_Parthenium_argentatum_ |
| | cDNA_clone_PBC079C09,_mRNA_sequence |
| 138 | gi\|294701502\|gb\|GW785367.1\|GW785367_PBC079B05_09795_Parthenium_ |
| | argentatum_cold_acclimated_bark_cDNA_library_(PBC)_Parthenium_argentatum_ |
| | cDNA_clone_PBC079B05,_mRNA_sequence |
| 139 | gi\|294701454\|gb\|GW785319.1\|GW785319_PBC078E12_09747_Parthenium_ |
| | argentatum_cold_acclimated_bark_cDNA_library_(PBC)_Parthenium_argentatum_ |
| | cDNA_clone_PBC078E12,_mRNA_sequence |
| 140 | gi\|294701439\|gb\|GW785304.1\|GW785304_PBC078D08_09732_Parthenium_ |
| | argentatum_cold_acclimated_bark_cDNA_library_(PBC)_Parthenium_argentatum_ |
| | cDNA_clone_PBC078D08,_mRNA_sequence |
| 141 | gi\|294701407\|gb\|GW785272.1\|GW785272_PBC078A12_09700_Parthenium_ |
| | argentatum_cold_acclimated_bark_cDNA_library_(PBC)_Parthenium_argentatum_ |
| | cDNA_clone_PBC078A12,_mRNA_sequence |
| 142 | gi\|294701404\|gb\|GW785269.1\|GW785269_PBC078A09_09697_Parthenium_ |
| | argentatum_cold_acclimated_bark_cDNA_library_(PBC)_Parthenium_argentatum_ |
| | cDNA_clone_PBC078A09,_mRNA_sequence |
| 143 | gi\|294701402\|gb\|GW785267.1\|GW785267_PBC078A06_09695_Parthenium_ |
| | argentatum_cold_acclimated_bark_cDNA_library_(PBC)_Parthenium_argentatum_ |
| | cDNA_clone_PBC078A06,_mRNA_sequence |
| 144 | gi\|294701398\|gb\|GW785263.1\|GW785263_PBC078A05_09691_Parthenium_ |
| | argentatum_cold_acclimated_bark_cDNA_library_(PBC)_Parthenium_argentatum_ |
| | cDNA_clone_PBC078A05,_mRNA_sequence |
| 145 | gi\|294701367\|gb\|GW785232.1\|GW785232_PBC077F06_09660_Parthenium_ |
| | argentatum_cold_acclimated_bark_cDNA_library_(PBC)_Parthenium_argentatum_ |
| | cDNA_clone_PBC077F06,_mRNA_sequence |
| 146 | gi\|294701340\|gb\|GW785205.1\|GW785205_PBC077D05_09633_Parthenium_ |
| | argentatum_cold_acclimated_bark_cDNA_library_(PBC)_Parthenium_argentatum_ |
| | cDNA_clone_PBC077D05,_mRNA_sequence |
| 147 | gi\|294701308\|gb\|GW785173.1\|GW785173_PBC077A05_09601_Parthenium_ |
| | argentatum_cold_acclimated_bark_cDNA_library_(PBC)_Parthenium_argentatum_ |
| | cDNA_clone_PBC077A05,_mRNA_sequence |
| 148 | gi\|294701291\|gb\|GW785156.1\|GW785156_PBC076G11_09584_Parthenium_ |
| | argentatum_cold_acclimated_bark_cDNA_library_(PBC)_Parthenium_argentatum_ |
| | cDNA_clone_PBC076G11,_mRNA_sequence |
| 149 | gi\|294701289\|gb\|GW785154.1\|GW785154_PBC076G09_09582_Parthenium_ |
| | argentatum_cold_acclimated_bark_cDNA_library_(PBC)_Parthenium_argentatum_ |
| | cDNA_clone_PBC076G09,_mRNA_sequence |
| 150 | gi\|294701279\|gb\|GW785144.1\|GW785144_PBC076F11_09572_Parthenium_ |
| | argentatum_cold_acclimated_bark_cDNA_library_(PBC)_Parthenium_argentatum_ |
| | cDNA_clone_PBC076F11,_mRNA_sequence |
| 151 | gi\|294701279\|gb\|GW785144.1\|GW785144_PBC076F11_09572_Parthenium_ |
| | argentatum_cold_acclimated_bark_cDNA_library_(PBC)_Parthenium_argentatum_ |
| | cDNA_clone_PBC076F11,_mRNA_sequence |
| 152 | gi\|294701276\|gb\|GW785141.1\|GW785141_PBC076F08_09569_Parthenium_ |
| | argentatum_cold_acclimated_bark_cDNA_library_(PBC)_Parthenium_argentatum_ |
| | cDNA_clone_PBC076F08,_mRNA_sequence |
| 153 | gi\|294701260\|gb\|GW785125.1\|GW785125_PBC076E05_09553_Parthenium_ |
| | argentatum_cold_acclimated_bark_cDNA_library_(PBC)_Parthenium_argentatum_ |
| | cDNA_clone_PBC076E05,_mRNA_sequence |
| 154 | gi\|294701245\|gb\|GW785110.1\|GW785110_PBC076C11_09538_Parthenium_ |
| | argentatum_cold_acclimated_bark_cDNA_library_(PBC)_Parthenium_argentatum_ |
| | cDNA_clone_PBC076C11,_mRNA_sequence |
| 155 | gi\|294701171\|gb\|GW785036.1\|GW785036_PBC075E07_09464_Parthenium_ |
| | argentatum_cold_acclimated_bark_cDNA_library_(PBC)_Parthenium_argentatum_ |
| | cDNA_clone_PBC075E07,_mRNA_sequence |
| 156 | gi\|294701098\|gb\|GW784963.1\|GW784963_PBC074F10_09391_Parthenium_ |
| | argentatum_cold_acclimated_bark_cDNA_library_(PBC)_Parthenium_argentatum_ |
| | cDNA_clone_PBC074F10,_mRNA_sequence |
| 157 | gi\|294701078\|gb\|GW784943.1\|GW784963_PBC074D11_09371_Parthenium_ |
| | argentatum_cold_acclimated_bark_cDNA_library_(PBC)_Parthenium_argentatum_ |
| | cDNA_clone_PBC074D11,_mRNA_sequence |
| 158 | gi\|294699459\|gb\|GW782279.1\|GW782279_PBC044F04_06707_Parthenium_ |
| | argentatum_cold_acclimated_bark_cDNA_library_(PBC)_Parthenium_argentatum_ |
| | cDNA_clone_PBC044F04,_mRNA_sequence |
| 159 | gi\|294699449\|gb\|GW782269.1\|GW782269_PBC044E04_06697_Parthenium_ |
| | argentatum_cold_acclimated_bark_cDNA_library_(PBC)_Parthenium_argentatum_ |
| | cDNA_clone_PBC044E04,_mRNA_sequence |
| 160 | gi\|294699424\|gb\|GW776635.1\|GW776635_PAB913D06_01063_Parthenium_ |
| | argentatum_cold_acclimated_bark_cDNA_library_(PAB)_Parthenium_argentatum_ |
| | cDNA_clone_PAB913D06,_mRNA_sequence |
| 161 | gi\|294699406\|gb\|GW776617.1\|GW776617_PAB913B03_01045_Parthenium_ |
| | argentatum_cold_acclimated_bark_cDNA_library_(PAB)_Parthenium_argentatum_ |
| | cDNA_clone_PAB913B03,_mRNA_sequence |
| 162 | gi\|294699252\|gb\|GW782233.1\|GW782233_PBC044A11_06661_Parthenium_ |
| | argentatum_cold_acclimated_bark_cDNA_library_(PBC)_Parthenium_argentatum_ |
| | cDNA_clone_PBC044A11,_mRNA_sequence |
| 163 | gi\|294699231\|gb\|GW782212.1\|GW782212_PBC043G10_06640_Parthenium_ |
| | argentatum_cold_acclimated_bark_cDNA_library_(PBC)_Parthenium_argentatum_ |
| | cDNA_clone_PBC043G10,_mRNA_sequence |
| 164 | gi\|294699224\|gb\|GW782205.1\|GW782205_PBC043G04_06633_Parthenium_ |
| | argentatum_cold_acclimated_bark_cDNA_library_(PBC)_Parthenium_argentatum_ |
| | cDNA_clone_PBC043G04,_mRNA_sequence |
| 165 | gi\|294699198\|gb\|GW782179.1\|GW782179_PBC043E04_06607_Parthenium_ |
| | argentatum_cold_acclimated_bark_cDNA_library_(PBC)_Parthenium_argentatum_ |
| | cDNA_clone_PBC043E04,_mRNA_sequence |
| 166 | gi\|294699189\|gb\|GW782170.1\|GW78217_PBC043D04_06598_Parthenium_ |
| | argentatum_cold_acclimated_bark_cDNA_library_(PBC)_Parthenium_argentatum_ |
| | cDNA_clone_PBC043D04,_mRNA_sequence |
| 167 | gi\|294699188\|gb\|GW776560.1\|GW776560_PAB912d07_00988_Parthenium_ |
| | argentatum_cold_acclimated_bark_cDNA_library_(PAB)_Parthenium_argentatum_ |
| | cDNA_clone_PAB912d07,_mRNA_sequence |
| 168 | gi\|294699173\|gb\|GW776545.1\|GW776545_PAB912a12_00973_Parthenium_ |
| | argentatum_cold_acclimated_bark_cDNA_library_(PAB)_Parthenium_argentatum_ |
| | cDNA_clone_PAB912a12,_mRNA_sequence |
| 169 | gi\|294699152\|gb\|GW776524.1\|GW776524_PAB912f07_00952_Parthenium_ |
| | argentatum_cold_acclimated_bark_cDNA_library_(PAB)_Parthenium_argentatum_ |
| | cDNA_clone_PAB912f07,_mRNA_sequence |
| 170 | gi\|294699137\|gb\|GW776509.1\|GW776509_PAB912d10_00937_Parthenium_ |
| | argentatum_cold_acclimated_bark_cDNA_library_(PBC)_Parthenium_argentatum_ |
| | cDNA_clone_PAB912d10,_mRNA_sequence |
| 171 | gi\|294699026\|gb\|GW782168.1\|GW784963_PBC043D04_06596_Parthenium_ |
| | argentatum_cold_acclimated_bark_cDNA_library_(PBC)_Parthenium_argentatum_ |
| | cDNA_clone_PBC043D04,_mRNA_sequence |
| 172 | gi\|294698976\|gb\|GW782118.1\|GW782118_PBC042G05_06546_Parthenium_ |
| | argentatum_cold_acclimated_bark_cDNA_library_(PBC)_Parthenium_argentatum_ |
| | cDNA_clone_PBC042G05,_mRNA_sequence |
| 173 | gi\|294698964\|gb\|GW782106.1\|GW782106_PBC042F05_06534_Parthenium_ |
| | argentatum_cold_acclimated_bark_cDNA_library_(PBC)_Parthenium_argentatum_ |
| | cDNA_clone_PBC042F05,_mRNA_sequence |
| 174 | gi\|294698952\|gb\|GW782094.1\|GW782094_PBC042E04_06522_Parthenium_ |
| | argentatum_cold_acclimated_bark_cDNA_library_(PBC)_Parthenium_argentatum_ |
| | cDNA_clone_PBC042E04,_mRAN_sequence |
| 175 | gi\|294698943\|gb\|GW776476.1\|GW776476_PAB911c07_00904_Parthenium_ |
| | argentatum_cold_acclimated_bark_cDNA_library_(PAB)_Parthenium_argentatum_ |
| | cDNA_clone_PAB911c07,_mRAN_sequence |
| 176 | gi\|294698940\|gb\|GW776473.1\|GW776473_PAB911f09_00901_Parthenium_ |
| | argentatum_cold_acclimated_bark_cDNA_library_(PAB)_Parthenium_argentatum_ |
| | cDNA_clone_PAB911f09,_mRNA_sequence |
| 177 | gi\|294698908\|gb\|GW776441.1\|GW776441_PAB911c03_00869_Parthenium_ |
| | argentatum_cold_acclimated_bark_cDNA_library_(PAB)_Parthenium_argentatum_ |
| | cDNA_clone_PAB911c03,_mRNA_sequence |
| 178 | gi\|294698892\|gb\|GW776425.1\|GW776425_PAB911c01_00853_Parthenium_ |
| | argentatum_cold_acclimated_bark_cDNA_library_(PAB)_Parthenium_argentatum_ |
| | cDNA_clone_PAB911c01,_mRNA_sequence |
| 179 | gi\|294698874\|gb\|GW776407.1\|GW776407_PAB911f01_00835_Parthenium_ |
| | argentatum_cold_acclimated_bark_cDNA_library_(PAB)_Parthenium_argentatum_ |
| | cDNA_clone_PAB911f01,_mRNA_sequence |
| 180 | gi\|294698726\|gb\|GW782029.1\|GW782029_PBC041G06_06457_Parthenium_ |
| | argentatum_cold_acclimated_bark_cDNA_library_(PBC)_Parthenium_argentatum_ |
| | cDNA_clone_PBC041G06,_mRNA_sequence |
| 181 | gi\|294698540\|gb\|GW782004.1\|GW782004_PBC041E04_06432_Parthenium_ |
| | argentatum_cold_acclimated_bark_cDNA_library_(PBC)_Parthenium_argentatum_ |
| | cDNA_clone_PBC041E04,_mRNA_sequence |
| 182 | gi\|294698539\|gb\|GW782003.1_GW782003_PBC041E04_06431_Parthenium_ |
| | argentatum_cold_acclimated_bark_cDNA_library_(PBC)_Parthenium_argentatum_ |
| | cDNA_clone_PBC041E04,_mRNA_sequence |
| 183 | gi\|29469853\|gb\|GW781995.1\|GW781995_PBC041D06_06423_Parthenium_ |
| | argentatum_cold_acclimated_bark_cDNA_library_(PBC)_Parthenium_argentatum_ |
| | cDNA_clone_PBC041D06,_mRNA_sequence |
| 184 | gi\|294698526\|gb\|GW781990.1\|GW781990_PBC041D04_06418_Parthenium_ |
| | argentatum_cold_acclimated_bark_cDNA_library_(PBC)_Parthenium_argentatum_ |
| | cDNA_clone_PBC041D04,_mRNA_sequence |
| 185 | gi\|294698519\|gb\|GW781983.1\|GW781983_PBC041C06_06411_Parthenium_ |
| | argentatum_cold_acclimated_bark_cDNA_library_(PBC)_Parthenium_argentatum_ |
| | cDNA_clone_PBC041C06,_mRNA_sequence |
| 186 | gi\|294698504\|gb\|GW781968.1\|GW781968_PBC041B04_06396_Parthenium_ |
| | argentatum_cold_acclimated_bark_cDNA_library_(PBC)_Parthenium_argentatum_ |
| | cDNA_clone_PBC041B04,_mRNA_sequence |
| 187 | gi\|294698500\|gb\|GW781964.1\|GW781964_PBC041A11_06392_Parthenium_ |
| | argentatum_cold_acclimated_bark_cDNA_library_(PBC)_Parthenium_argentatum_ |
| | cDNA_clone_PBC041A11,_mRNA_sequence |
| 188 | gi\|294698479\|gb\|GW781943.1\|GW781943_PBC040H04_06371_Parthenium_ |
| | argentatum_cold_acclimated_bark_cDNA_library_(PBC)_Parthenium_argentatum_ |
| | cDNA_clone_PBC040H04,_mRNA_sequence |
| 189 | gi\|294698440\|gb\|GW776295.1\|GW776295_PAB909e01_00723_Parthenium_ |
| | argentatum_cold_acclimated_bark_cDNA_library_(PAB)_Parthenium_argentatum_ |
| | cDNA_clone_PAB909e01,_mRNA_sequence |
| 190 | gi\|294698291\|gb\|GW781916.1\|GW781916_PBC040E09_06344_Parthenium_ |
| | argentatum_cold_acclimated_bark_cDNA_library_(PBC)_Parthenium_argentatum_ |
| | cDNA_clone_PBC040E09,_mRNA_sequence |
| 191 | gi\|294698273\|gb\|GW781898.1\|GW781898_PBC040D04_06326_Parthenium_ |
| | argentatum_cold_acclimated_bark_cDNA_library_(PBC)_Parthenium_argentatum_ |
| | cDNA_clone_PBC040D04,_mRNA_sequence |
| 192 | gi\|294698242\|gb\|GW781867.1\|GW781867_PBC040A06_06295_Parthenium_ |
| | argentatum_cold_acclimated_bark_cDNA_library_(PBC)_Parthenium_argentatum_ |
| | cDNA_clone_PBC040A06,_mRNA_sequence |
| 193 | gi\|294698242\|gb\|GW781867.1\|GW781867_PBC040A06_06295_Parthenium_ |
| | argentatum_cold_acclimated_bark_cDNA_library_(PBC)_Parthenium_argentatum_ |
| | cDNA_clone_PBC040A06,_mRNA_sequence |
| 194 | gi\|294698191\|gb\|GW776207.1\|GW776207_PAB908a04_00635_Parthenium_ |
| | argentatum_cold_acclimated_bark_cDNA_library_(PAB)_Parthenium_argentatum_ |
| | cDNA_clone_PAB908a04,_mRNA_sequence |
| 195 | gi\|294698154\|gb\|GW776170.1\|GW776170_PAB908g04_00598_Parthenium_ |
| | argentatum_cold_acclimated_bark_cDNA_library_(PAB)_Parthenium_argentatum_ |
| | cDNA_clone_PAB908g04,_mRNA_sequence |
| 196 | gi\|294698047\|gb\|GW781833.1\|GW781833_PBC039F06_06261_Parthenium_ |
| | argentatum_cold_acclimated_bark_cDNA_library_(PBC)_Parthenium_argentatum_ |
| | cDNA_clone_PBC039F06,_mRNA_sequence |
| 197 | gi\|294698028\|gb\|GW781814.1\|GW781814_PBC039D10_06242_Parthenium_ |
| | argentatum_cold_acclimated_bark_cDNA_library_(PBC)_Parthenium_argentatum_ |
| | cDNA_clone_PBC039D10,_mRNA_sequence |
| 198 | gi\|294697958\|gb\|GW776135.1\|GW776135_PAB907c12_00563_Parthenium_ |
| | argentatum_cold_acclimated_bark_cDNA_library_(PAB)_Parthenium_argentatum_ |
| | cDNA_clone_PAB907c12,_mRNA_sequence |
| 199 | gi\|294697949\|gb\|GW776126.1\|GW776126_PAB907g01_00554_Parthenium_ |
| | argentatum_cold_acclimated_bark_cDNA_library_(PAB)_Parthenium_argentatum_ |
| | cDNA_clone_PAB907g01,_mRNA_sequence |
| 200 | gi\|294697929\|gb\|GW776106.1\|GW776106_PAB907g09_00534_Parthenium_ |
| | argentatum_cold_acclimated_bark_cDNA_library_(PAB)_Parthenium_argentatum_ |
| | cDNA_clone_PAB907g09,_mRNA_sequence |
| 201 | gi\|294697925\|gb\|GW776102.1\|GW776102_PAB907c09_00530_Parthenium_ |
| | argentatum_cold_acclimated_bark_cDNA_library_(PAB)_Parthenium_argentatum_ |
| | cDNA_clone_PAB907c09,_mRNA_sequence |
| 202 | gi\|294697887\|gb\|GW779224.1\|GW779224_PBC010H10_03652_Parthenium_ |
| | argentatum_cold_acclimated_bark_cDNA_library_(PBC)_Parthenium_argentatum_ |
| | cDNA_clone_PBC010H10,_mRAN_sequence |
| 203 | gi\|294697774\|gb\|GW779111.1\|GW779111_PBC009F10_03539_Parthenium_ |
| | argentatum_cold_acclimated_bark_cDNA_library_(PBC)_Parthenium_argentatum_ |
| | cDNA_clone_PBC009F10,_mRAN_sequence |
| 204 | gi\|294697771\|gb\|GW779108.1\|GW7791108_PBC009F07_03536_Parthenium_ |
| | argentatum_cold_acclimated_bark_cDNA_library_(PBC)_Parthenium_argentatum_ |
| | cDNA_clone_PBC009F07,_mRAN_sequence |
| 205 | gi\|294697768\|gb\|GW779105.1\|GW779105_PBC009F04_03533_Parthenium_ |
| | argentatum_cold_acclimated_bark_cDNA_library_(PBC)_Parthenium_argentatum_ |
| | cDNA_clone_PBC009F04,_mRAN_sequence |
| 206 | gi\|294697755\|gb\|GW779092.1\|GW779092_PBC009E03_03520_Parthenium_ |
| | argentatum_cold_acclimated_bark_cDNA_library_(PBC)_Parthenium_argentatum_ |
| | cDNA_clone_PBC009E03,_mRAN_sequence |
| 207 | gi\|294697707\|gb\|GW779044.1\|GW779044_PBC008H12_03472_Parthenium_ |
| | argentatum_cold_acclimated_bark_cDNA_library_(PBC)_Parthenium_argentatum_ |
| | cDNA_clone_PBC008H12,_mRAN_sequence |
| 208 | gi\|294697698\|gb\|GW779035.1\|GW779035_PBC008H03_03463_Parthenium_ |
| | argentatum_cold_acclimated_bark_cDNA_library_(PBC)_Parthenium_argentatum_ |
| | cDNA_clone_PBC008H03,_mRAN_sequence |
| 209 | gi\|294697697\|gb\|GW779034.1\|GW779034_PBC008H01_03462_Parthenium_ |
| | argentatum_cold_acclimated_bark_cDNA_library_(PBC)_Parthenium_argentatum_ |
| | cDNA_clone_PBC008H01,_mRAN_sequence |
| 210 | gi\|294697689\|gb\|GW779026.1\|GW779026_PBC008G05_03454_Parthenium_ |
| | argentatum_cold_acclimated_bark_cDNA_library_(PBC)_Parthenium_argentatum_ |
| | cDNA_clone_PBC008G05,_mRAN_sequence |
| 211 | gi\|294697673\|gb\|GW779010.1\|GW779010_PBC008E12_03438_Parthenium_ |
| | argentatum_cold_acclimated_bark_cDNA_library_(PBC)_Parthenium_argentatum_ |
| | cDNA_clone_PBC008E12,_mRAN_sequence |
| 212 | gi\|294697669\|gb\|GW779006.1\|GW779006_PBC008E08_03434_Parthenium_ |
| | argentatum_cold_acclimated_bark_cDNA_library_(PBC)_Parthenium_argentatum_ |
| | cDNA_clone_PBC008E08,_mRAN_sequence |
| 213 | gi\|294697629\|gb\|GW778966.1\|GW778966_PBC008A12_03394_Parthenium_ |
| | argentatum_cold_acclimated_bark_cDNA_library_(PBC)_Parthenium_argentatum_ |
| | cDNA_clone_PBC008A12,_mRAN_sequence |
| 214 | gi\|294697628\|gb\|GW778965.1\|GW778965_PBC008A11_03393_Parthenium_ |
| | argentatum_cold_acclimated_bark_cDNA_library_(PBC)_Parthenium_argentatum_ |
| | cDNA_clone_PBC008A11,_mRAN_sequence |
| 215 | gi\|294697562\|gb\|GW778899.1\|GW778899_PBC007C12_03327_Parthenium_ |
| | argentatum_cold_acclimated_bark_cDNA_library_(PBC)_Parthenium_argentatum_ |
| | cDNA_clone_PBC007C12,_mRAN_sequence |
| 216 | gi\|294697557\|gb\|GW778894.1\|GW778894_PBC007C06_03322_Parthenium_ |
| | argentatum_cold_acclimated_bark_cDNA_library_(PBC)_Parthenium_argentatum_ |
| | cDNA_clone_PBC007C06,_mRAN_sequence |
| 217 | gi\|294697540\|gb\|GW778877.1\|GW778877_PBC007A12_03305_Parthenium_ |
| | argentatum_cold_acclimated_bark_cDNA_library_(PBC)_Parthenium_argentatum_ |
| | cDNA_clone_PBC007A12,_mRAN_sequence |
| 218 | gi\|294697497\|gb\|GW778834.1\|GW778834_PBC006F04_03262_Parthenium_ |
| | argentatum_cold_acclimated_bark_cDNA_library_(PBC)_Parthenium_argentatum_ |
| | cDNA_clone_PBC006F04,_mRAN_sequence |
| 219 | gi\|294697442\|gb\|GW778779.1\|GW778779_PBC005H12_03207_Parthenium_ |
| | argentatum_cold_acclimated_bark_cDNA_library_(PBC)_Parthenium_argentatum_ |
| | cDNA_clone_PBC005H12,_mRAN_sequence |
| 220 | gi\|294697437\|gb\|GW778774.1\|GW778774_PBC005H07_03202_Parthenium_ |
| | argentatum_cold_acclimated_bark_cDNA_library_(PBC)_Parthenium_argentatum_ |
| | cDNA_clone_PBC005H07,_mRAN_sequence |
| 221 | gi\|294697368\|gb\|GW778705.1\|GW778705_PBC005B08_03133_Parthenium_ |
| | argentatum_cold_acclimated_bark_cDNA_library_(PBC)_Parthenium_argentatum_ |
| | cDNA_clone_PBC005B08,_mRAN_sequence |
| 222 | gi\|294697364\|gb\|GW778701.1\|GW778701_PBC005B04_03129_Parthenium_ |
| | argentatum_cold_acclimated_bark_cDNA_library_(PBC)_Parthenium_argentatum_ |
| | cDNA_clone_PBC005B04,_mRAN_sequence |
| 223 | gi\|294697342\|gb\|GW778679.1\|GW778679_PBC004H06_03107_Parthenium_ |
| | argentatum_cold_acclimated_bark_cDNA_library_(PBC)_Parthenium_argentatum_ |
| | cDNA_clone_PBC004H06,_mRAN_sequence |
| 224 | gi\|294697329\|gb\|GW778666.1\|GW778666_PBC004G03_03094_Parthenium_ |
| | argentatum_cold_acclimated_bark_cDNA_library_(PBC)_Parthenium_argentatum_ |
| | cDNA_clone_PBC004G03,_mRAN_sequence |
| 225 | gi\|294697324\|gb\|GW778661.1\|GW778661_PBC004F10_03089_Parthenium_ |
| | argentatum_cold_acclimated_bark_cDNA_library_(PBC)_Parthenium_argentatum_ |
| | cDNA_clone_PBC004F10,_mRAN_sequence |
| 226 | gi\|294697310\|gb\|GW778647.1\|GW778647_PBC004E06_03075_Parthenium_ |
| | argentatum_cold_acclimated_bark_cDNA_library_(PBC)_Parthenium_argentatum_ |
| | cDNA_clone_PBC004E06,_mRAN_sequence |
| 227 | gi\|294697287\|gb\|GW778624.1\|GW778624_PBC004C05_03052_Parthenium_ |
| | argentatum_cold_acclimated_bark_cDNA_library_(PBC)_Parthenium_argentatum_ |
| | cDNA_clone_PBC004C05,_mRAN_sequence |
| 228 | gi\|294697189\|gb\|GW787305.1\|GW787305_PBC100H06_11733_Parthenium_ |
| | argentatum_cold_acclimated_bark_cDNA_library_(PBC)_Parthenium_argentatum_ |
| | cDNA_clone_PBC100H06,_mRAN_sequence |
| 229 | gi\|294697098\|gb\|GW787296.1\|GW787296_PBC100G08_11724_Parthenium_ |
| | argentatum_cold_acclimated_bark_cDNA_library_(PBC)_Parthenium_argentatum_ |
| | cDNA_clone_PBC100G08,_mRAN_sequence |
| 230 | gi\|294697081\|gb\|GW787279.1\|GW787279_PBC100F05_11707_Parthenium_ |
| | argentatum_cold_acclimated_bark_cDNA_library_(PBC)_Parthenium_argentatum_ |
| | cDNA_clone_PBC100F05,_mRAN_sequence |
| 231 | gi\|294697076\|gb\|GW787274.1\|GW787274_PBC100E08_11702_Parthenium_ |
| | argentatum_cold_acclimated_bark_cDNA_library_(PBC)_Parthenium_argentatum_ |
| | cDNA_clone_PBC100E08,_mRAN_sequence |
| 232 | gi\|294697050\|gb\|GW787248.1\|GW787248_PBC100C05_11676_Parthenium_ |
| | argentatum_cold_acclimated_bark_cDNA_library_(PBC)_Parthenium_argentatum_ |
| | cDNA_clone_PBC100C05,_mRAN_sequence |
| 233 | gi\|294696944\|gb\|GW787224.1\|GW787224_PBC100A05_11652_Parthenium_ |
| | argentatum_cold_acclimated_bark_cDNA_library_(PBC)_Parthenium_argentatum_ |
| | cDNA_clone_PBC100A05,_mRAN_sequence |
| 234 | gi\|294696926\|gb\|GW787206.1\|GW787206_PBC099G06_11634_Parthenium_ |
| | argentatum_cold_acclimated_bark_cDNA_library_(PBC)_Parthenium_argentatum_ |
| | cDNA_clone_PBC099G06,_mRAN_sequence |
| 235 | gi\|294696781\|gb\|GW787143.1\|GW787143_PBC099A10_11571_Parthenium_ |
| | argentatum_cold_acclimated_bark_cDNA_library_(PBC)_Parthenium_argentatum_ |
| | cDNA_clone_PBC099A10,_mRAN_sequence |
| 236 | gi\|294696622\|gb\|GW787066.1\|GW787066_PBC098C05_11494_Parthenium_ |
| | argentatum_cold_acclimated_bark_cDNA_library_(PBC)_Parthenium_argentatum_ |
| | cDNA_clone_PBC098C05,_mRAN_sequence |
| 237 | gi\|294696582\|gb\|GW787026.1\|GW787026_PBC097G09_11454_Parthenium_ |
| | argentatum_cold_acclimated_bark_cDNA_library_(PBC)_Parthenium_argentatum_ |
| | cDNA_clone_PBC097G09,_mRAN_sequence |
| 238 | gi\|294696398\|gb\|GW786935.1\|GW786935_PBC096G06_11363_Parthenium_ |
| | argentatum_cold_acclimated_bark_cDNA_library_(PBC)_Parthenium_argentatum_ |
| | cDNA_clone_PBC096G06,_mRAN_sequence |
| 239 | gi\|294696387\|gb\|GW786924.1\|GW786924_PBC096F05_11352_Parthenium_ |
| | argentatum_cold_acclimated_bark_cDNA_library_(PBC)_Parthenium_argentatum_ |
| | cDNA_clone_PBC096F05,_mRAN_sequence |
| 240 | gi\|294696284\|gb\|GW786903.1\|GW786903_PBC096D06_11331_Parthenium_ |
| | argentatum_cold_acclimated_bark_cDNA_library_(PBC)_Parthenium_argentatum_ |
| | cDNA_clone_PBC096D06,_mRAN_sequence |
| 241 | gi\|294696221\|gb\|GW786840.1\|GW786840_PBC095F09_11268_Parthenium_ |
| | argentatum_cold_acclimated_bark_cDNA_library_(PBC)_Parthenium_argentatum_ |
| | cDNA_clone_PBC095F09,_mRAN_sequence |
| 242 | gi\|294696103\|gb\|GW786804.1\|GW786804_PBC095C07_11232_Parthenium_ |
| | argentatum_cold_acclimated_bark_cDNA_library_(PBC)_Parthenium_argentatum_ |
| | cDNA_clone_PBC095C07,_mRAN_sequence |
| 243 | gi\|294695793\|gb\|GW784921.1\|GW784921_PBC074B12_09349_Parthenium_ |
| | argentatum_cold_acclimated_bark_cDNA_library_(PBC)_Parthenium_argentatum_ |
| | cDNA_clone_PBC074B12,_mRAN_sequence |
| 244 | gi\|294695793\|gb\|GW784921.1\|GW784921_PBC074B12_09349_Parthenium_ |
| | argentatum_cold_acclimated_bark_cDNA_library_(PBC)_Parthenium_argentatum_ |
| | cDNA_clone_PBC074B12,_mRAN_sequence |
| 245 | gi\|294695786\|gb\|GW784914.1\|GW784914_PBC074B05_09342_Parthenium_ |
| | argentatum_cold_acclimated_bark_cDNA_library_(PBC)_Parthenium_argentatum_ |
| | cDNA_clone_PBC074B05,_mRAN_sequence |
| 246 | gi\|294695778\|gb\|GW784906.1\|GW784906_PBC074A09_09334_Parthenium_ |
| | argentatum_cold_acclimated_bark_cDNA_library_(PBC)_Parthenium_argentatum_ |
| | cDNA_clone_PBC074A09,_mRAN_sequence |
| 247 | gi\|294695776\|gb\|GW784904.1\|GW784904_PBC074A07_09332_Parthenium_ |
| | argentatum_cold_acclimated_bark_cDNA_library_(PBC)_Parthenium_argentatum_ |
| | cDNA_clone_PBC074A07,_mRAN_sequence |
| 248 | gi\|294695740\|gb\|GW784868.1\|GW784868_PBC073F05_09296_Parthenium_ |
| | argentatum_cold_acclimated_bark_cDNA_library_(PBC)_Parthenium_argentatum_ |
| | cDNA_clone_PBC073F05,_mRAN_sequence |
| 249 | gi\|294695446\|gb\|GW784818.1\|GW784818_PBC073A10_09246_Parthenium_ |
| | argentatum_cold_acclimated_bark_cDNA_library_(PBC)_Parthenium_argentatum_ |
| | cDNA_clone_PBC073A10,_mRAN_sequence |
| 250 | gi\|294695407\|gb\|GW784779.1\|GW784779_PBC072F06_09207_Parthenium_ |
| | argentatum_cold_acclimated_bark_cDNA_library_(PBC)_Parthenium_argentatum_ |
| | cDNA_clone_PBC072F06,_mRAN_sequence |
| 251 | gi\|294695104\|gb\|GW784720.1\|GW784720_PBC072A05_09148_Parthenium_ |
| | argentatum_cold_acclimated_bark_cDNA_library_(PBC)_Parthenium_argentatum_ |
| | cDNA_clone_PBC072A05,_mRAN_sequence |
| 252 | gi\|294694836\|gb\|GW784696.1\|GW784696_PBC071G05_09124_Parthenium_ |
| | argentatum_cold_acclimated_bark_cDNA_library_(PBC)_Parthenium_argentatum_ |
| | cDNA_clone_PBC071G05,_mRAN_sequence |
| 253 | gi\|294694818\|gb\|GW784678.1\|GW784678_PBC071E05_09106_Parthenium_ |
| | argentatum_cold_acclimated_bark_cDNA_library_(PBC)_Parthenium_argentatum_ |
| | cDNA_clone_PBC071E05,_mRAN_sequence |
| 254 | gi\|294694776\|gb\|GW784636.1\|GW784636_PBC071A07_09064_Parthenium_ |
| | argentatum_cold_acclimated_bark_cDNA_library_(PBC)_Parthenium_argentatum_ |
| | cDNA_clone_PBC071A07,_mRAN_sequence |
| 255 | gi\|294694457\|gb\|GW784561.1\|GW784561_PBC070B11_08989_Parthenium_ |
| | argentatum_cold_acclimated_bark_cDNA_library_(PBC)_Parthenium_argentatum_ |
| | cDNA_clone_PBC070B11,_mRAN_sequence |
| 256 | gi\|294694259\|gb\|GW784527.1\|GW784527_PBC069H05_09064_Parthenium_ |
| | argentatum_cold_acclimated_bark_cDNA_library_(PBC)_Parthenium_argentatum_ |
| | cDNA_clone_PBC069H05,_mRAN_sequence |
| 257 | gi\|294694247\|gb\|GW784515.1\|GW784515_PBC069F12_08943_Parthenium_ |
| | argentatum_cold_acclimated_bark_cDNA_library_(PBC)_Parthenium_argentatum_ |
| | cDNA_clone_PBC069F12,_mRAN_sequence |
| 258 | gi\|294694234\|gb\|GW784502.1\|GW784502_PBC069E10_08930_Parthenium_ |
| | argentatum_cold_acclimated_bark_cDNA_library_(PBC)_Parthenium_argentatum_ |
| | cDNA_clone_PBC069E10,_mRAN_sequence |
| 259 | gi\|294694230\|gb\|GW784498.1\|GW784498_PBC069E06_08926_Parthenium_ |
| | argentatum_cold_acclimated_bark_cDNA_library_(PBC)_Parthenium_argentatum_ |
| | cDNA_clone_PBC069E06,_mRAN_sequence |
| 260 | gi\|294694215\|gb\|GW784483.1\|GW784483_PBC069D05_08911_Parthenium_ |
| | argentatum_cold_acclimated_bark_cDNA_library_(PBC)_Parthenium_argentatum_ |
| | cDNA_clone_PBC069D05,_mRAN_sequence |
| 261 | gi\|294694201\|gb\|GW784469.1\|GW784469_PBC069B10_08897_Parthenium_ |
| | argentatum_cold_acclimated_bark_cDNA_library_(PBC)_Parthenium_argentatum_ |
| | cDNA_clone_PBC069B10_mRNA_sequence |
| 262 | gi\|294693983\|gb\|GW784415.1\|GW784415_PBC068F05_08843_Parthenium_ |
| | argentatum_cold_acclimated_bark_cDNA_library_(PBC)_Parthenium_argentatum_ |
| | cDNA_clone_PBC068F05,_mRNA_sequence |
| 263 | gi\|294693755\|gb\|GW784351.1\|GW784351_PBC067H06_08879_Parthenium_ |
| | argentatum_cold_acclimated_bark_cDNA_library_(PBC)_Parthenium_argentatum_ |
| | cDNA_clone_PBC067H06,_mRNA_sequence |
| 264 | gi\|294693731\|gb\|GW784327.1\|GW784327_PBC067F05_08755_Parthenium_ |
| | argentatum_cold_acclimated_bark_cDNA_library_(PBC)_Parthenium_argentatum_ |
| | cDNA_clone_PBC067F05,_mRNA_sequence |
| 265 | gi\|294693719\|gb\|GW784315.1\|GW784315_PBC067E05_08743_Parthenium_ |
| | argentatum_cold_acclimated_bark_cDNA_library_(PBC)_Parthenium_argentatum_ |
| | cDNA_clone_PBC067F05,_mRNA_sequence |
| 266 | gi\|294693716\|gb\|GW784312.1\|GW784312_PBC067E05_08740_Parthenium_ |
| | argentatum_cold_acclimated_bark_cDNA_library_(PBC)_Parthenium_argentatum_ |
| | cDNA_clone_PBC067E05,_mRNA_sequence |
| 267 | gi\|294693464\|gb\|GW781774.1\|GW781774_PBC039A03_06202_Parthenium_ |
| | argentatum_cold_acclimated_bark_cDNA_library_(PBC)_Parthenium_argentatum_ |
| | cDNA_clone_PBC039A03,_mRNA_sequence |
| 268 | gi\|294693447\|gb\|GW781757.1\|GW781757_PBC038G08_06185_Parthenium_ |
| | argentatum_cold_acclimated_bark_cDNA_library_(PBC)_Parthenium_argentatum_ |
| | cDNA_clone_PBC038G08,_mRNA_sequence |
| 269 | gi\|294693432\|gb\|GW781742.1\|GW781742_PBC038F04_06170_Parthenium_ |
| | argentatum_cold_acclimated_bark_cDNA_library_(PBC)_Parthenium_argentatum_ |
| | cDNA_clone_PBC038F04,_mRNA_sequence |
| 270 | gi\|294693397\|gb\|GW781707.1\|GW781707_PBC038C03_06135_Parthenium_ |
| | argentatum_cold_acclimated_bark_cDNA_library_(PBC)_Parthenium_argentatum_ |
| | cDNA_clone_PBC038C03,_mRNA_sequence |
| 271 | gi\|294693128\|gb\|GW781680.1\|GW781680_PBC037H10_06108_Parthenium_ |
| | argentatum_cold_acclimated_bark_cDNA_library_(PBC)_Parthenium_argentatum_ |
| | cDNA_clone_PBC037H10,_mRNA_sequence |
| 272 | gi\|294692815\|gb\|GW781609.1\|GW781609_PBC037B07_06037_Parthenium_ |
| | argentatum_cold_acclimated_bark_cDNA_library_(PBC)_Parthenium_argentatum_ |
| | cDNA_clone_PBC037B07,_mRNA_sequence |
| 273 | gi\|294692811\|gb\|GW781605.1\|GW781605_PBC037B03_06033_Parthenium_ |
| | argentatum_cold_acclimated_bark_cDNA_library_(PBC)_Parthenium_argentatum_ |
| | cDNA_clone_PBC037B03,_mRNA_sequence |
| 274 | gi\|294692767\|gb\|GW781561.1\|GW781561_PBC036F03_05989_Parthenium_ |
| | argentatum_cold_acclimated_bark_cDNA_library_(PBC)_Parthenium_argentatum_ |
| | cDNA_clone_PBC036F03,_mRNA_sequence |
| 275 | gi\|294692765\|gb\|GW781559.1\|GW781559_PBC036E11_05987_Parthenium_ |
| | argentatum_cold_acclimated_bark_cDNA_library_(PBC)_Parthenium_argentatum_ |
| | cDNA_clone_PBC036E11,_mRNA_sequence |
| 276 | gi\|294692762\|gb\|GW781556.1\|GW781556_PBC036E08_05984_Parthenium_ |
| | argentatum_cold_acclimated_bark_cDNA_library_(PBC)_Parthenium_argentatum_ |
| | cDNA_clone_PBC036E08,_mRNA_sequence |
| 277 | gi\|294692751\|gb\|GW781545.1\|GW781545_PBC036D08_05973_Parthenium_ |
| | argentatum_cold_acclimated_bark_cDNA_library_(PBC)_Parthenium_argentatum_ |
| | cDNA_clone_PBC036D08,_mRNA_sequence |
| 278 | gi\|294692496\|gb\|GW781532.1\|GW781532_PBC036C07_05960_Parthenium_ |
| | argentatum_cold_acclimated_bark_cDNA_library_(PBC)_Parthenium_argentatum_ |
| | cDNA_clone_PBC036C07,_mRNA_sequence |
| 279 | gi\|294692491\|gb\|GW781527.1\|GW781527_PBC036C03_05955_Parthenium_ |
| | argentatum_cold_acclimated_bark_cDNA_library_(PBC)_Parthenium_argentatum_ |
| | cDNA_clone_PBC036C03,_mRNA_sequence |
| 280 | gi\|294692484\|gb\|GW781520.1\|GW781520_PBC036B07_05948_Parthenium_ |
| | argentatum_cold_acclimated_bark_cDNA_library_(PBC)_Parthenium_argentatum_ |
| | cDNA_clone_PBC036B07,_mRNA_sequence |
| 281 | gi\|294692473\|gb\|GW781509.1\|GW781509_PBC036A08_05937_Parthenium_ |
| | argentatum_cold_acclimated_bark_cDNA_library_(PBC)_Parthenium_argentatum_ |
| | cDNA_clone_PBC036A08,_mRNA_sequence |
| 282 | gi\|294692448\|gb\|GW781484.1\|GW781484_PBC035G06_05912_Parthenium_ |
| | argentatum_cold_acclimated_bark_cDNA_library_(PBC)_Parthenium_argentatum_ |
| | cDNA_clone_PBC035G06,_mRNA_sequence |
| 283 | gi\|294692168\|gb\|GW781446.1\|GW781446_PBC035D03_05874_Parthenium_ |
| | argentatum_cold_acclimated_bark_cDNA_library_(PBC)_Parthenium_argentatum_ |
| | cDNA_clone_PBC035D03,_mRNA_sequence |
| 284 | gi\|294692163\|gb\|GW781441.1\|GW781441_PBC035C10_05869_Parthenium_ |
| | argentatum_cold_acclimated_bark_cDNA_library_(PBC)_Parthenium_argentatum_ |
| | cDNA_clone_PBC035C10,_mRNA_sequence |
| 285 | gi\|294692155\|gb\|GW781433.1\|GW781433_PBC035C03_05861_Parthenium_ |
| | argentatum_cold_acclimated_bark_cDNA_library_(PBC)_Parthenium_argentatum_ |
| | cDNA_clone_PBC035C03,_mRNA_sequence |
| 286 | gi\|294691855\|gb\|GW781375.1\|GW781375_PBC034F03_05803_Parthenium_ |
| | argentatum_cold_acclimated_bark_cDNA_library_(PBC)_Parthenium_argentatum_ |
| | cDNA_clone_PBC034F03,_mRNA_sequence |
| 287 | gi\|294691825\|gb\|GW781345.1\|GW781345_PBC034C06_05773_Parthenium_ |
| | argentatum_cold_acclimated_bark_cDNA_library_(PBC)_Parthenium_argentatum_ |
| | cDNA_clone_PBC034C06,_mRNA_sequence |
| 288 | gi\|294691811\|gb\|GW781331.1\|GW781331_PBC034B03_05759_Parthenium_ |
| | argentatum_cold_acclimated_bark_cDNA_library_(PBC)_Parthenium_argentatum_ |
| | cDNA_clone_PBC034B03,_mRNA_sequence |
| 289 | gi\|294691793\|gb\|GW781313.1\|GW781313_PBC033H08_05741_Parthenium_ |
| | argentatum_cold_acclimated_bark_cDNA_library_(PBC)_Parthenium_argentatum_ |
| | cDNA_clone_PBC033H08,_mRNA_sequence |
| 290 | gi\|294691616\|gb\|GW781290.1\|GW781290_PBC033F09_05718_Parthenium_ |
| | argentatum_cold_acclimated_bark_cDNA_library_(PBC)_Parthenium_argentatum_ |
| | cDNA_clone_PBC033F09,_mRNA_sequence |
| 291 | gi\|294691599\|gb\|GW781273.1\|GW781273_PBC033E03_05701_Parthenium_ |
| | argentatum_cold_acclimated_bark_cDNA_library_(PBC)_Parthenium_argentatum_ |
| | cDNA_clone_PBC033E03,_mRNA_sequence |
| 292 | gi\|294691565\|gb\|GW781239.1\|GW781239_PBC033A11_05667_Parthenium_ |
| | argentatum_cold_acclimated_bark_cDNA_library_(PBC)_Parthenium_argentatum_ |
| | cDNA_clone_PBC033A11,_mRNA_sequence |
| 293 | gi\|294691383\|gb\|GW781219.1\|GW781219_PBC032H03_05647_Parthenium_ |
| | argentatum_cold_acclimated_bark_cDNA_library_(PBC)_Parthenium_argentatum_ |
| | cDNA_clone_PBC032H03,_mRNA_sequence |
| 294 | gi\|294691382\|gb\|GW781218.1\|GW781218_PBC032G12_05646_Parthenium_ |
| | argentatum_cold_acclimated_bark_cDNA_library_(PBC)_Parthenium_argentatum_ |
| | cDNA_clone_PBC032G12,_mRNA_sequence |
| 295 | gi\|294691321\|gb\|GW781157.1\|GW781157_PBC032B03_05585_Parthenium_ |
| | argentatum_cold_acclimated_bark_cDNA_library_(PBC)_Parthenium_argentatum_ |
| | cDNA_clone_PBC032B03,_mRNA_sequence |
| 296 | gi\|294691208\|gb\|GW784286.1\|GW784286_PBC067B11_08714_Parthenium_ |
| | argentatum_cold_acclimated_bark_cDNA_library_(PBC)_Parthenium_argentatum_ |
| | cDNA_clone_PBC067B11,_mRNA_sequence |
| 297 | gi\|294691197\|gb\|GW784275.1\|GW784275_PBC067A12_08703_Parthenium_ |
| | argentatum_cold_acclimated_bark_cDNA_library_(PBC)_Parthenium_argentatum_ |
| | cDNA_clone_PBC067A12,_mRNA_sequence |
| 298 | gi\|294691186\|gb\|GW784264.1\|GW784264_PBC067A05_08692_Parthenium_ |
| | argentatum_cold_acclimated_bark_cDNA_library_(PBC)_Parthenium_argentatum_ |
| | cDNA_clone_PBC067A05,_mRNA_sequence |
| 299 | gi\|294691165\|gb\|GW784243.1\|GW784243_PBC066G05_08671_Parthenium_ |
| | argentatum_cold_acclimated_bark_cDNA_library_(PBC)_Parthenium_argentatum_ |
| | cDNA_clone_PBC066G05,_mRNA_sequence |
| 300 | gi\|294691156\|gb\|GW784234.1\|GW784234_PBC066F06_08662_Parthenium_ |
| | argentatum_cold_acclimated_bark_cDNA_library_(PBC)_Parthenium_argentatum_ |
| | cDNA_clone_PBC066F06,_mRNA_sequence |
| 301 | gi\|294691052\|gb\|GW784212.1\|GW784212_PBC066D07_08640_Parthenium_ |
| | argentatum_cold_acclimated_bark_cDNA_library_(PBC)_Parthenium_argentatum_ |
| | cDNA_clone_PBC066D07,_mRNA_sequence |
| 302 | gi\|294691030\|gb\|GW784190.1\|GW784190_PBC066B07_08618_Parthenium_ |
| | argentatum_cold_acclimated_bark_cDNA_library_(PBC)_Parthenium_argentatum_ |
| | cDNA_clone_PBC066B07,_mRNA_sequence |
| 303 | gi\|294691024\|gb\|GW784184.1\|GW784184_PBC066B05_08612_Parthenium_ |
| | argentatum_cold_acclimated_bark_cDNA_library_(PBC)_Parthenium_argentatum_ |
| | cDNA_clone_PBC066B05,_mRNA_sequence |
| 304 | gi\|294691008\|gb\|GW784168.1\|GW784168_PBC065H09_08596_Parthenium_ |
| | argentatum_cold_acclimated_bark_cDNA_library_(PBC)_Parthenium_argentatum_ |
| | cDNA_clone_PBC065H09,_mRNA_sequence |
| 305 | gi\|294691008\|gb\|GW784168.1\|GW784168_PBC065H09_08596_Parthenium_ |
| | argentatum_cold_acclimated_bark_cDNA_library_(PBC)_Parthenium_argentatum_ |
| | cDNA_clone_PBC065H09,_mRNA_sequence |
| 306 | gi\|294691004\|gb\|GW784164.1\|GW784164_PBC065H05_08592_Parthenium_ |
| | argentatum_cold_acclimated_bark_cDNA_library_(PBC)_Parthenium_argentatum_ |
| | cDNA_clone_PBC065H05,_mRNA_sequence |
| 307 | gi\|294690989\|gb\|GW784149.1\|GW784149_PBC065F12_08577_Parthenium_ |
| | argentatum_cold_acclimated_bark_cDNA_library_(PBC)_Parthenium_argentatum_ |
| | cDNA_clone_PBC065F12,_mRNA_sequence |
| 308 | gi\|294690894\|gb\|GW784136.1\|GW784136_PBC065E11_08564_Parthenium_ |
| | argentatum_cold_acclimated_bark_cDNA_library_(PBC)_Parthenium_argentatum_ |
| | cDNA_clone_PBC067H06,_mRNA_sequence |
| 309 | gi\|294690893\|gb\|GW784135.1\|GW784135_PBC065E09_08563_Parthenium_ |
| | argentatum_cold_acclimated_bark_cDNA_library_(PBC)_Parthenium_argentatum_ |
| | cDNA_clone_PBC065E09,_mRNA_sequence |
| 310 | gi\|294690880\|gb\|GW784122.1\|GW784122_PBC065D07_08550_Parthenium_ |
| | argentatum_cold_acclimated_bark_cDNA_library_(PBC)_Parthenium_argentatum_ |
| | cDNA_clone_PBC065D07,_mRNA_sequence |
| 311 | gi\|294690868\|gb\|GW784110.1\|GW784110_PBC065C06_08538_Parthenium_ |
| | argentatum_cold_acclimated_bark_cDNA_library_(PBC)_Parthenium_argentatum_ |
| | cDNA_clone_PBC065C06,_mRNA_sequence |
| 312 | gi\|294690856\|gb\|GW784098.1\|GW7844098_PBC065B06_08526_Parthenium_ |
| | argentatum_cold_acclimated_bark_cDNA_library_(PBC)_Parthenium_argentatum_ |
| | cDNA_clone_PBC065B06,_mRNA_sequence |
| 313 | gi\|294690839\|gb\|GW784081.1\|GW784081_PBC065A05_08509_Parthenium_ |
| | argentatum_cold_acclimated_bark_cDNA_library_(PBC)_Parthenium_argentatum_ |
| | cDNA_clone_PBC065A05,_mRNA_sequence |
| 314 | gi\|294690693\|gb\|GW784017.1\|GW784017_PBC064C08_08445_Parthenium_ |
| | argentatum_cold_acclimated_bark_cDNA_library_(PBC)_Parthenium_argentatum_ |
| | cDNA_clone_PBC064C08,_mRNA_sequence |
| 315 | gi\|294690682\|gb\|GW784006.1\|GW784006_PBC064B05_08434_Parthenium_ |
| | argentatum_cold_acclimated_bark_cDNA_library_(PBC)_Parthenium_argentatum_ |
| | cDNA_clone_PBC064B05,_mRNA_sequence |
| 316 | gi\|294690667\|gb\|GW783991.1\|GW783991_PBC064A05_08419_Parthenium_ |
| | argentatum_cold_acclimated_bark_cDNA_library_(PBC)_Parthenium_argentatum_ |
| | cDNA_clone_PBC064A05,_mRNA_sequence |
| 317 | gi\|294690572\|gb\|GW783978.1\|GW783978_PBC063G11_08406_Parthenium_ |
| | argentatum_cold_acclimated_bark_cDNA_library_(PBC)_Parthenium_argentatum_ |
| | cDNA_clone_PBC063G11,_mRNA_sequence |
| 318 | gi\|294690551\|gb\|GW783957.1\|GW783957_PBC063E11_08385_Parthenium_ |
| | argentatum_cold_acclimated_bark_cDNA_library_(PBC)_Parthenium_argentatum_ |
| | cDNA_clone_PBC063E11,_mRNA_sequence |
| 319 | gi\|294690385\|gb\|GW783873.1\|GW783873_PBC062F07_08301_Parthenium_ |
| | argentatum_cold_acclimated_bark_cDNA_library_(PBC)_Parthenium_argentatum_ |
| | cDNA_clone_PBC062F07,_mRNA_sequence |
| 320 | gi\|294690251\|gb\|GW783821.1\|GW783821_PBC062B05_08249_Parthenium_ |
| | argentatum_cold_acclimated_bark_cDNA_library_(PBC)_Parthenium_argentatum_ |
| | cDNA_clone_PBC062B05,_mRNA_sequence |
| 321 | gi\|294690207\|gb\|GW783777.1\|GW783777_PBC061E11_08205_Parthenium_ |
| | argentatum_cold_acclimated_bark_cDNA_library_(PBC)_Parthenium_argentatum_ |
| | cDNA_clone_PBC061E11,_mRNA_sequence |
| 322 | gi\|294690085\|gb\|GW783737.1\|GW783737_PBC061B05_08165_Parthenium_ |
| | argentatum_cold_acclimated_bark_cDNA_library_(PBC)_Parthenium_argentatum_ |
| | cDNA_clone_PBC061B05,_mRNA_sequence |
| 323 | gi\|294690070\|gb\|GW783722.1\|GW783722_PBC060H10_08150_Parthenium_ |
| | argentatum_cold_acclimated_bark_cDNA_library_(PBC)_Parthenium_argentatum_ |
| | cDNA_clone_PBC060H10,_mRNA_sequence |
| 324 | gi\|294690069\|gb\|GW783721.1\|GW783721_PBC060H09_08149_Parthenium_ |
| | argentatum_cold_acclimated_bark_cDNA_library_(PBC)_Parthenium_argentatum_ |
| | cDNA_clone_PBC060H09,_mRNA_sequence |
| 325 | gi\|294690060\|gb\|GW783712.1\|GW783712_PBC060G12_08140_Parthenium_ |
| | argentatum_cold_acclimated_bark_cDNA_library_(PBC)_Parthenium_argentatum_ |
| | cDNA_clone_PBC060G12,_mRNA_sequence |
| 326 | gi\|294690058\|gb\|GW783710.1\|GW783710_PBC060G10_08138_Parthenium_ |
| | argentatum_cold_acclimated_bark_cDNA_library_(PBC)_Parthenium_argentatum_ |
| | cDNA_clone_PBC060G10,_mRNA_sequence |
| 327 | gi\|294690034\|gb\|GW783686.1\|GW783686_PBC060E09_08114_Parthenium_ |
| | argentatum_cold_acclimated_bark_cDNA_library_(PBC)_Parthenium_argentatum_ |
| | cDNA_clone_PBC060E09,_mRNA_sequence |
| 328 | gi\|294690014\|gb\|GW776082.1\|GW776082_PAB907b09_00510_Parthenium_ |
| | argentatum_cold_acclimated_bark_cDNA_library_(PAB)_Parthenium_argentatum_ |
| | cDNA_clone_PAB067b09,_mRNA_sequence |
| 329 | gi\|294689982\|gb\|GW776050.1\|GW776050_PAB906h02_00478_Parthenium_ |
| | argentatum_cold_acclimated_bark_cDNA_library_(PAB)_Parthenium_argentatum_ |
| | cDNA_clone_PAB906h02,_mRNA_sequence |
| 330 | gi\|294689958\|gb\|GW776026.1\|GW776026_PAB906g07_08743_Parthenium_ |
| | argentatum_cold_acclimated_bark_cDNA_library_(PAB)_Parthenium_argentatum_ |
| | cDNA_clone_PAB906g07,_mRNA_sequence |
| 331 | gi\|294689839\|gb\|GW786731.1\|GW786731_PBC094D12_11159_Parthenium_ |
| | argentatum_cold_acclimated_bark_cDNA_library_(PBC)_Parthenium_argentatum_ |
| | cDNA_clone_PBC094D12,_mRNA_sequence |
| 332 | gi\|294689831\|gb\|GW786723.1\|GW786723_PBC094D05_11151_Parthenium_ |
| | argentatum_cold_acclimated_bark_cDNA_library_(PBC)_Parthenium_argentatum_ |
| | cDNA_clone_PBC094D05,_mRNA_sequence |
| 333 | gi\|294689826\|gb\|GW786718.1\|GW786718_PBC094C11_11146_Parthenium_ |
| | argentatum_cold_acclimated_bark_cDNA_library_(PBC)_Parthenium_argentatum_ |
| | cDNA_clone_PBC094C11,_mRNA_sequence |
| 334 | gi\|294689798\|gb\|GW786690.1\|GW786690_PBC094A06_11118_Parthenium_ |
| | argentatum_cold_acclimated_bark_cDNA_library_(PBC)_Parthenium_argentatum_ |
| | cDNA_clone_PBC094A06,_mRNA_sequence |
| 335 | gi\|294689751\|gb\|GW775946.1\|GW775946_PAB905c05_00374_Parthenium_ |
| | argentatum_cold_acclimated_bark_cDNA_library_(PAB)_Parthenium_argentatum_ |
| | cDNA_clone_PAB905c05,_mRNA_sequence |
| 336 | gi\|294689647\|gb\|GW786666.1\|GW786666_PBC093G05_11094_Parthenium_ |
| | argentatum_cold_acclimated_bark_cDNA_library_(PBC)_Parthenium_argentatum_ |
| | cDNA_clone_PBC093G05,_mRNA_sequence |
| 337 | gi\|294689589\|gb\|GW786608.1\|GW786608_PBC093B05_11036_Parthenium_ |
| | argentatum_cold_acclimated_bark_cDNA_library_(PBC)_Parthenium_argentatum_ |
| | cDNA_clone_PBC093B05,_mRNA_sequence |
| 338 | gi\|294689588\|gb\|GW786607.1\|GW786607_PBC093B05_11035_Parthenium_ |
| | argentatum_cold_acclimated_bark_cDNA_library_(PBC)_Parthenium_argentatum_ |
| | cDNA_clone_PBC093B05,_mRNA_sequence |
| 339 | gi\|294689541\|gb\|GW775895.1\|GW775895_PAB904b04_00323_Parthenium_ |
| | argentatum_cold_acclimated_bark_cDNA_library_(PAB)_Parthenium_argentatum_ |
| | cDNA_clone_PAB904b04,_mRNA_sequence |
| 340 | gi\|294689534\|gb\|GW775888.1\|GW775888_PAB904d03_00316_Parthenium_ |
| | argentatum_cold_acclimated_bark_cDNA_library_(PAB)_Parthenium_argentatum_ |
| | cDNA_clone_PAB904d03,_mRNA_sequence |
| 341 | gi\|294689361\|gb\|GW786539.1\|GW786539_PBC092D05_10967_Parthenium_ |
| | argentatum_cold_acclimated_bark_cDNA_library_(PBC)_Parthenium_argentatum_ |
| | cDNA_clone_PBC092D05,_mRNA_sequence |
| 342 | gi\|294689279\|gb\|GW775792.1\|GW775792_PAB903c06_00220_Parthenium_ |
| | argentatum_cold_acclimated_bark_cDNA_library_(PAB)_Parthenium_argentatum_ |
| | cDNA_clone_PAB903c06,_mRNA_sequence |
| 343 | gi\|294689277\|gb\|GW775790.1\|GW775790_PAB903c10_00218_Parthenium_ |
| | argentatum_cold_acclimated_bark_cDNA_library_(PAB)_Parthenium_argentatum_ |
| | cDNA_clone_PAB903c10,_mRNA_sequence |
| 344 | gi\|294689161\|gb\|GW786498.1\|GW786498_PBC091H05_10926_Parthenium_ |
| | argentatum_cold_acclimated_bark_cDNA_library_(PBC)_Parthenium_argentatum_ |
| | cDNA_clone_PBC091H05,_mRNA_sequence |
| 345 | gi\|294689146\|gb\|GW786483.1\|GW786483_PBC091G05_10911_Parthenium_ |
| | argentatum_cold_acclimated_bark_cDNA_library_(PBC)_Parthenium_argentatum_ |
| | cDNA_clone_PBC091G05,_mRNA_sequence |
| 346 | gi\|294689119\|gb\|GW786456.1\|GW786456_PBC091D11_10884_Parthenium_ |
| | argentatum_cold_acclimated_bark_cDNA_library_(PBC)_Parthenium_argentatum_ |
| | cDNA_clone_PBC091D11,_mRNA_sequence |
| 347 | gi\|294689112\|gb\|GW786449.1\|GW786449_PBC091D05_10877_Parthenium_ |
| | argentatum_cold_acclimated_bark_cDNA_library_(PBC)_Parthenium_argentatum_ |
| | cDNA_clone_PBC091D05,_mRNA_sequence |
| 348 | gi\|294689105\|gb\|GW786442.1\|GW786442_PBC091C09_10870_Parthenium_ |
| | argentatum_cold_acclimated_bark_cDNA_library_(PBC)_Parthenium_argentatum_ |
| | cDNA_clone_PBC091C09,_mRNA_sequence |
| 349 | gi\|294689080\|gb\|GW775752.1\|GW775752_PAB903b09_00180_Parthenium_ |
| | argentatum_cold_acclimated_bark_cDNA_library_(PAB)_Parthenium_argentatum_ |
| | cDNA_clone_PAB903b09,_mRNA_sequence |
| 350 | gi\|294689039\|gb\|GW775711.1\|GW775711_PAB902e03_00139_Parthenium_ |
| | argentatum_cold_acclimated_bark_cDNA_library_(PAB)_Parthenium_argentatum_ |
| | cDNA_clone_PAB902e03,_mRNA_sequence |
| 351 | gi\|294689036\|gb\|GW775708.1\|GW775708_PAB902h05_00136_Parthenium_ |
| | argentatum_cold_acclimated_bark_cDNA_library_(PAB)_Parthenium_argentatum_ |
| | cDNA_clone_PAB902h05,_mRNA_sequence |
| 352 | gi\|294689028\|gb\|GW775700.1\|GW775700_PAB902c02_00128_Parthenium_ |
| | argentatum_cold_acclimated_bark_cDNA_library_(PAB)_Parthenium_argentatum_ |
| | cDNA_clone_PAB902c02,_mRNA_sequence |
| 353 | gi\|294689025\|gb\|GW775697.1\|GW775697_PAB902c11_00125_Parthenium_ |
| | argentatum_cold_acclimated_bark_cDNA_library_(PAB)_Parthenium_argentatum_ |
| | cDNA_clone_PAB902c11,_mRNA_sequence |
| 354 | gi\|294689020\|gb\|GW775692.1\|GW775692_PAB902h08_00120_Parthenium_ |
| | argentatum_cold_acclimated_bark_cDNA_library_(PAB)_Parthenium_argentatum_ |
| | cDNA_clone_PAB902h08,_mRNA_sequence |
| 355 | gi\|294688934\|gb\|GW786430.1\|GW786430_PBC091B09_10858_Parthenium_ |
| | argentatum_cold_acclimated_bark_cDNA_library_(PAB)_Parthenium_argentatum_ |
| | cDNA_clone_PBC091B09,_mRNA_sequence |
| 356 | gi\|294688912\|gb\|GW786408.1\|GW786408_PBC090H07_10836_Parthenium_ |
| | argentatum_cold_acclimated_bark_cDNA_library_(PAB)_Parthenium_argentatum_ |
| | cDNA_clone_PBC090H07,_mRNA_sequence |
| 357 | gi\|294688882\|gb\|GW786378.1\|GW786378_PBC090E06_10806_Parthenium_ |
| | argentatum_cold_acclimated_bark_cDNA_library_(PAB)_Parthenium_argentatum_ |
| | cDNA_clone_PBC090E06,_mRNA_sequence |
| 358 | gi\|294688873\|gb\|GW786369.1\|GW786369_PBC090D09_10797_Parthenium_ |
| | argentatum_cold_acclimated_bark_cDNA_library_(PAB)_Parthenium_argentatum_ |
| | cDNA_clone_PBC090D09,_mRNA_sequence |
| 359 | gi\|294688866\|gb\|GW786362.1\|GW786362_PBC090D05_10790_Parthenium_ |
| | argentatum_cold_acclimated_bark_cDNA_library_(PAB)_Parthenium_argentatum_ |
| | cDNA_clone_PBC090D05,_mRNA_sequence |
| 360 | gi\|294688865\|gb\|GW786361.1\|GW786361_PBC090C12_10789_Parthenium_ |
| | argentatum_cold_acclimated_bark_cDNA_library_(PAB)_Parthenium_argentatum_ |
| | cDNA_clone_PBC090C12,_mRNA_sequence |
| 361 | gi\|294688852\|gb\|GW775683.1\|GW775683_PAB902c05_00111_Parthenium_ |
| | argentatum_cold_acclimated_bark_cDNA_library_(PAB)_Parthenium_argentatum_ |
| | cDNA_clone_PAB902c05,_mRNA_sequence |
| 362 | gi\|294688846\|gb\|GW775677.1\|GW775677_PAB902e04_00105_Parthenium_ |
| | argentatum_cold_acclimated_bark_cDNA_library_(PAB)_Parthenium_argentatum_ |
| | cDNA_clone_PAB902e04,_mRNA_sequence |
| 363 | gi\|294688701\|gb\|GW786356.1\|GW786356_PBC090C07_10784_Parthenium_ |
| | argentatum_cold_acclimated_bark_cDNA_library_(PAB)_Parthenium_argentatum_ |
| | cDNA_clone_PBC090C07,_mRNA_sequence |
| 364 | gi\|294688701\|gb\|GW786356.1\|GW786356_PBC090C07_10784_Parthenium_ |
| | argentatum_cold_acclimated_bark_cDNA_library_(PAB)_Parthenium_argentatum_ |
| | cDNA_clone_PBC090C07,_mRNA_sequence |
| 365 | gi\|294688651\|gb\|GW786306.1\|GW786306_PBC089F05_10734_Parthenium_ |
| | argentatum_cold_acclimated_bark_cDNA_library_(PAB)_Parthenium_argentatum_ |
| | cDNA_clone_PBC089F05,_mRNA_sequence |
| 366 | gi\|294688635\|gb\|GW786290.1\|GW786290_PBC089D12_10718_Parthenium_ |
| | argentatum_cold_acclimated_bark_cDNA_library_(PAB)_Parthenium_argentatum_ |
| | cDNA_clone_PBC089D12,_mRNA_sequence |
| 367 | gi\|294688618\|gb\|GW775609.1\|GW775609_PAB901d06_00037_Parthenium_ |
| | argentatum_cold_acclimated_bark_cDNA_library_(PAB)_Parthenium_argentatum_ |
| | cDNA_clone_PAB901d06,_mRNA_sequence |
| 368 | gi\|294688613\|gb\|GW775604.1\|GW775604_PAB901c03_00032_Parthenium_ |
| | argentatum_cold_acclimated_bark_cDNA_library_(PAB)_Parthenium_argentatum_ |
| | cDNA_clone_PAB901c03,_mRNA_sequence |
| 369 | gi\|294688601\|gb\|GW775592.1\|GW775592_PAB901a11_00020_Parthenium_ |
| | argentatum_cold_acclimated_bark_cDNA_library_(PAB)_Parthenium_argentatum_ |
| | cDNA_clone_PAB901a11,_mRNA_sequence |
| 370 | gi\|294688592\|gb\|GW775583.1\|GW775583_PAB901e05_00011_Parthenium_ |
| | argentatum_cold_acclimated_bark_cDNA_library_(PAB)_Parthenium_argentatum_ |
| | cDNA_clone_PAB901e05,_mRNA_sequence |
| 371 | gi\|294688500\|gb\|GW786276.1\|GW786276_PBC089C09_10704_Parthenium_ |
| | argentatum_cold_acclimated_bark_cDNA_library_(PAB)_Parthenium_argentatum_ |
| | cDNA_clone_PBC089C09,_mRNA_sequence |
| 372 | gi\|294688478\|gb\|GW786254.1\|GW786254_PBC089A11_10682_Parthenium_ |
| | argentatum_cold_acclimated_bark_cDNA_library_(PAB)_Parthenium_argentatum_ |
| | cDNA_clone_PBC089A11,_mRNA_sequence |
| 373 | gi\|294688459\|gb\|GW786235.1\|GW786235_PBC088H05_10663_Parthenium_ |
| | argentatum_cold_acclimated_bark_cDNA_library_(PAB)_Parthenium_argentatum_ |
| | cDNA_clone_PBC088H05,_mRNA_sequence |
| 374 | gi\|294688450\|gb\|GW786226.1\|GW786226_PBC088G07_10654_Parthenium_ |
| | argentatum_cold_acclimated_bark_cDNA_library_(PAB)_Parthenium_argentatum_ |
| | cDNA_clone_PBC088G07,_mRNA_sequence |
| 375 | gi\|294688446\|gb\|GW786222.1\|GW786222_PBC088G05_10650_Parthenium_ |
| | argentatum_cold_acclimated_bark_cDNA_library_(PAB)_Parthenium_argentatum_ |
| | cDNA_clone_PBC088G05,_mRNA_sequence |
| 376 | gi\|294688432\|gb\|GW786208.1\|GW786208_PBC088F05_10636_Parthenium_ |
| | argentatum_cold_acclimated_bark_cDNA_library_(PAB)_Parthenium_argentatum_ |
| | cDNA_clone_PBC088F05,_mRNA_sequence |
| 377 | gi\|294688425\|gb\|GW786201.1\|GW786201_PBC088E05_10629_Parthenium_ |
| | argentatum_cold_acclimated_bark_cDNA_library_(PAB)_Parthenium_argentatum_ |
| | cDNA_clone_PBC088E05,_mRNA_sequence |
| 378 | gi\|294688270\|gb\|GW786126.1\|GW786126_PBC087F09_10554_Parthenium_ |
| | argentatum_cold_acclimated_bark_cDNA_library_(PAB)_Parthenium_argentatum_ |
| | cDNA_clone_PBC087F09,_mRNA_sequence |
| 379 | gi\|294688173\|gb\|GW778606.1\|GW778606_PBC004A11_03034_Parthenium_ |
| | argentatum_cold_acclimated_bark_cDNA_library_(PAB)_Parthenium_argentatum_ |
| | cDNA_clone_PBC004A11,_mRNA_sequence |
| 380 | gi\|294688144\|gb\|GW778577.1\|GW778577_PBC003G05_03005_Parthenium_ |
| | argentatum_cold_acclimated_bark_cDNA_library_(PAB)_Parthenium_argentatum_ |
| | cDNA_clone_PBC003G05,_mRNA_sequence |
| 381 | gi\|294688119\|gb\|GW778552.1\|GW778552_PBC003E04_02980_Parthenium_ |
| | argentatum_cold_acclimated_bark_cDNA_library_(PAB)_Parthenium_argentatum_ |
| | cDNA_clone_PBC003E04,_mRNA_sequence |
| 382 | gi\|294688103\|gb\|GW778536.1\|GW778536_PBC003C11_02964_Parthenium_ |
| | argentatum_cold_acclimated_bark_cDNA_library_(PAB)_Parthenium_argentatum_ |
| | cDNA_clone_PBC003C11,_mRNA_sequence |
| 383 | gi\|294688020\|gb\|GW778535.1\|GW778535_PBC003C10_02963_Parthenium_ |
| | argentatum_cold_acclimated_bark_cDNA_library_(PAB)_Parthenium_argentatum_ |
| | cDNA_clone_PBC003C10,_mRNA_sequence |
| 384 | gi\|294688020\|gb\|GW778535.1\|GW778535_PBC003C10_02963_Parthenium_ |
| | argentatum_cold_acclimated_bark_cDNA_library_(PAB)_Parthenium_argentatum_ |
| | cDNA_clone_PBC003C10,_mRNA_sequence |
| 385 | gi\|294687992\|gb\|GW778507.1\|GW778507_PBC003A05_02935_Parthenium_ |
| | argentatum_cold_acclimated_bark_cDNA_library_(PAB)_Parthenium_argentatum_ |
| | cDNA_clone_PBC003A05,_mRNA_sequence |
| 386 | gi\|294687832\|gb\|GW778429.1\|GW778429_PBC002B04_02857_Parthenium_ |
| | argentatum_cold_acclimated_bark_cDNA_library_(PAB)_Parthenium_argentatum_ |
| | cDNA_clone_PBC002B04,_mRNA_sequence |
| 387 | gi\|294687815\|gb\|GW778412.1\|GW778412_PBC001H11_02840_Parthenium_ |
| | argentatum_cold_acclimated_bark_cDNA_library_(PAB)_Parthenium_argentatum_ |
| | cDNA_clone_PBC001H11,_mRNA_sequence |
| 388 | gi\|294687684\|gb\|GW778352.1\|GW778352_PBC001C08_02780_Parthenium_ |
| | argentatum_cold_acclimated_bark_cDNA_library_(PAB)_Parthenium_argentatum_ |
| | cDNA_clone_PBC001C08,_mRNA_sequence |
| 389 | gi\|294687676\|gb\|GW778344.1\|GW778344_PBC001B11_02772_Parthenium_ |
| | argentatum_cold_acclimated_bark_cDNA_library_(PAB)_Parthenium_argentatum_ |
| | cDNA_clone_PBC001B11,_mRNA_sequence |
| 390 | gi\|294687656\|gb\|GW778324.1\|GW778324_PBC001A02_02752_Parthenium_ |
| | argentatum_cold_acclimated_bark_cDNA_library_(PAB)_Parthenium_argentatum_ |
| | cDNA_clone_PBC001A02,_mRNA_sequence |
| 391 | gi\|294687643\|gb\|GW778311.1\|GW778311_PAB936D11_02739_Parthenium_ |
| | argentatum_cold_acclimated_bark_cDNA_library_(PAB)_Parthenium_argentatum_ |
| | cDNA_clone_PAB936D11,_mRNA_sequence |
| 392 | gi\|294687642\|gb\|GW778310.1\|GW778310_PAB936C04_02738_Parthenium_ |
| | argentatum_cold_acclimated_bark_cDNA_library_(PAB)_Parthenium_argentatum_ |
| | cDNA_clone_PAB936C04,_mRNA_sequence |
| 393 | gi\|294687641\|gb\|GW778309.1\|GW778309_PAB936F01_02737_Parthenium_ |
| | argentatum_cold_acclimated_bark_cDNA_library_(PAB)_Parthenium_argentatum_ |
| | cDNA_clone_PAB936F01,_mRNA_sequence |
| 394 | gi\|294687637\|gb\|GW778305.1\|GW778305_PAB936B01_02733_Parthenium_ |
| | argentatum_cold_acclimated_bark_cDNA_library_(PAB)_Parthenium_argentatum_ |
| | cDNA_clone_PAB936B01,_mRNA_sequence |
| 395 | gi\|294687609\|gb\|GW778277.1\|GW778277_PAB936A10_02705_Parthenium_ |
| | argentatum_cold_acclimated_bark_cDNA_library_(PAB)_Parthenium_argentatum_ |
| | cDNA_clone_PAB936A10,_mRNA_sequence |
| 396 | gi\|294687593\|gb\|GW778261.1\|GW778261_PAB936D01_02689_Parthenium_ |
| | argentatum_cold_acclimated_bark_cDNA_library_(PAB)_Parthenium_argentatum_ |
| | cDNA_clone_PAB936D01,_mRNA_sequence |
| 397 | gi\|294687588\|gb\|GW778256.1\|GW778256_PAB936D10_02684_Parthenium_ |
| | argentatum_cold_acclimated_bark_cDNA_library_(PAB)_Parthenium_argentatum_ |
| | cDNA_clone_PAB936D10,_mRNA_sequence |
| 398 | gi\|294687528\|gb\|GW778196.1\|GW778196_PAB935H10_02624_Parthenium_ |
| | argentatum_cold_acclimated_bark_cDNA_library_(PAB)_Parthenium_argentatum_ |
| | cDNA_clone_PAB935H10,_mRNA_sequence |
| 399 | gi\|294687480\|gb\|GW778148.1\|GW778148_PAB935F10_02576_Parthenium_ |
| | argentatum_cold_acclimated_bark_cDNA_library_(PAB)_Parthenium_argentatum_ |
| | cDNA_clone_PAB935F10,_mRNA_sequence |
| 400 | gi\|294687425\|gb\|GW778093.1\|GW778093_PAB934G04_02521_Parthenium_ |
| | argentatum_cold_acclimated_bark_cDNA_library_(PAB)_Parthenium_argentatum_ |
| | cDNA_clone_PAB934G04,_mRNA_sequence |
| 401 | gi\|294687387\|gb\|GW778055.1\|GW778055_PAB933B05_02483_Parthenium_ |
| | argentatum_cold_acclimated_bark_cDNA_library_(PAB)_Parthenium_argentatum_ |
| | cDNA_clone_PAB933B05,_mRNA_sequence |
| 402 | gi\|294687380\|gb\|GW778048.1\|GW778048_PAB933D04_02476_Parthenium_ |
| | argentatum_cold_acclimated_bark_cDNA_library_(PAB)_Parthenium_argentatum_ |
| | cDNA_clone_PAB933D04,_mRNA_sequence |
| 403 | gi\|294687364\|gb\|GW778032.1\|GW778032_PAB933H11_02460_Parthenium_ |
| | argentatum_cold_acclimated_bark_cDNA_library_(PAB)_Parthenium_argentatum_ |
| | cDNA_clone_PAB933H11,_mRNA_sequence |
| 404 | gi\|294687346\|gb\|GW778014.1\|GW778014_PAB933E12_02442_Parthenium_ |
| | argentatum_cold_acclimated_bark_cDNA_library_(PAB)_Parthenium_argentatum_ |
| | cDNA_clone_PAB933E12,_mRNA_sequence |
| 405 | gi\|294686313\|gb\|GW781110.1\|GW781110_PBC031F03_05538_Parthenium_ |
| | argentatum_cold_acclimated_bark_cDNA_library_(PAB)_Parthenium_argentatum_ |
| | cDNA_clone_PBC031F03,_mRNA_sequence |
| 406 | gi\|294686307\|gb\|GW781104.1\|GW781104_PBC031E08_05532_Parthenium_ |
| | argentatum_cold_acclimated_bark_cDNA_library_(PAB)_Parthenium_argentatum_ |
| | cDNA_clone_PBC031E08,_mRNA_sequence |
| 407 | gi\|294686290\|gb\|GW781087.1\|GW781087_PBC031D03_05515_Parthenium_ |
| | argentatum_cold_acclimated_bark_cDNA_library_(PAB)_Parthenium_argentatum_ |
| | cDNA_clone_PBC031D03,_mRNA_sequence |
| 408 | gi\|294686101\|gb\|GW781062.1\|GW781062_PBC031A11_05490_Parthenium_ |
| | argentatum_cold_acclimated_bark_cDNA_library_(PAB)_Parthenium_argentatum_ |
| | cDNA_clone_PBC031A11,_mRNA_sequence |
| 409 | gi\|294685811\|gb\|GW780936.1\|GW780936_PBC029F05_05364_Parthenium_ |
| | argentatum_cold_acclimated_bark_cDNA_library_(PAB)_Parthenium_argentatum_ |
| | cDNA_clone_PBC029F05,_mRNA_sequence |
| 410 | gi\|294685796\|gb\|GW780921.1\|GW780921_PBC029E02_05349_Parthenium_ |
| | argentatum_cold_acclimated_bark_cDNA_library_(PAB)_Parthenium_argentatum_ |
| | cDNA_clone_PBC029E02,_mRNA_sequence |
| 411 | gi\|294685789\|gb\|GW780914.1\|GW780914_PBC029D07_05342_Parthenium_ |
| | argentatum_cold_acclimated_bark_cDNA_library_(PAB)_Parthenium_argentatum_ |
| | cDNA_clone_PBC029D07,_mRNA_sequence |
| 412 | gi\|294685610\|gb\|GW780894.1\|GW780894_PBC029B11_05322_Parthenium_ |
| | argentatum_cold_acclimated_bark_cDNA_library_(PAB)_Parthenium_argentatum_ |
| | cDNA_clone_PBC029B11,_mRNA_sequence |
| 413 | gi\|294685600\|gb\|GW780884.1\|GW780884_PBC029A12_05312_Parthenium_ |
| | argentatum_cold_acclimated_bark_cDNA_library_(PAB)_Parthenium_argentatum_ |
| | cDNA_clone_PBC029A12,_mRNA_sequence |
| 414 | gi\|294685567\|gb\|GW780851.1\|GW780851_PBC028G03_05279_Parthenium_ |
| | argentatum_cold_acclimated_bark_cDNA_library_(PAB)_Parthenium_argentatum_ |
| | cDNA_clone_PBC028G03,_mRNA_sequence |
| 415 | gi\|294685550\|gb\|GW780834.1\|GW780834_PBC028E05_05262_Parthenium_ |
| | argentatum_cold_acclimated_bark_cDNA_library_(PAB)_Parthenium_argentatum_ |
| | cDNA_clone_PBC028E05,_mRNA_sequence |
| 416 | gi\|294685378\|gb\|GW780826.1\|GW780826_PBC028D09_05254_Parthenium_ |
| | argentatum_cold_acclimated_bark_cDNA_library_(PAB)_Parthenium_argentatum_ |
| | cDNA_clone_PBC028D09,_mRNA_sequence |
| 417 | gi\|294685373\|gb\|GW780821.1\|GW780821_PBC028D04_05249_Parthenium_ |
| | argentatum_cold_acclimated_bark_cDNA_library_(PAB)_Parthenium_argentatum_ |
| | cDNA_clone_PBC028D04,_mRNA_sequence |
| 418 | gi\|294685341\|gb\|GW780789.1\|GW780789_PBC028A07_05217_Parthenium_ |
| | argentatum_cold_acclimated_bark_cDNA_library_(PAB)_Parthenium_argentatum_ |
| | cDNA_clone_PBC028A07,_mRNA_sequence |
| 419 | gi\|294685317\|gb\|GW780765.1\|GW780765_PBC027G05_05193_Parthenium_ |
| | argentatum_cold_acclimated_bark_cDNA_library_(PAB)_Parthenium_argentatum_ |
| | cDNA_clone_PBC027G05,_mRNA_sequence |
| 420 | gi\|294685316\|gb\|GW780764.1\|GW780764_PBC027G04_05192_Parthenium_ |
| | argentatum_cold_acclimated_bark_cDNA_library_(PAB)_Parthenium_argentatum_ |
| | cDNA_clone_PBC027G04,_mRNA_sequence |
| 421 | gi\|294685311\|gb\|GW780759.1\|GW780759_PBC027F11_05187_Parthenium_ |
| | argentatum_cold_acclimated_bark_cDNA_library_(PAB)_Parthenium_argentatum_ |
| | cDNA_clone_PBC027F11,_mRNA_sequence |
| 422 | gi\|294684877\|gb\|GW780653.1\|GW780653_PBC026E06_05081_Parthenium_ |
| | argentatum_cold_acclimated_bark_cDNA_library_(PAB)_Parthenium_argentatum_ |
| | cDNA_clone_PBC026E06,_mRNA_sequence |
| 423 | gi\|294684874\|gb\|GW780650.1\|GW780650_PBC026E02_05078_Parthenium_ |
| | argentatum_cold_acclimated_bark_cDNA_library_(PAB)_Parthenium_argentatum_ |
| | cDNA_clone_PBC026E02,_mRNA_sequence |
| 424 | gi\|294684864\|gb\|GW780640.1\|GW780640_PBC026D03_05068_Parthenium_ |
| | argentatum_cold_acclimated_bark_cDNA_library_(PAB)_Parthenium_argentatum_ |
| | cDNA_clone_PBC026D03,_mRNA_sequence |
| 425 | gi\|294684855\|gb\|GW780631.1\|GW780631_PBC026C06_05059_Parthenium_ |
| | argentatum_cold_acclimated_bark_cDNA_library_(PAB)_Parthenium_argentatum_ |
| | cDNA_clone_PBC026C06,_mRNA_sequence |
| 426 | gi\|294684818\|gb\|GW780594.1\|GW780594_PBC025H02_05022_Parthenium_ |
| | argentatum_cold_acclimated_bark_cDNA_library_(PAB)_Parthenium_argentatum_ |
| | cDNA_clone_PBC025H02,_mRNA_sequence |
| 427 | gi\|294684644\|gb\|GW780584.1\|GW780584_PBC025G03_05012_Parthenium_ |
| | argentatum_cold_acclimated_bark_cDNA_library_(PAB)_Parthenium_argentatum_ |
| | cDNA_clone_PBC025G03,_mRNA_sequence |
| 428 | gi\|294684629\|gb\|GW780569.1\|GW780569_PBC025E10_04997_Parthenium_ |
| | argentatum_cold_acclimated_bark_cDNA_library_(PAB)_Parthenium_argentatum_ |
| | cDNA_clone_PBC025E10,_mRNA_sequence |
| 429 | gi\|294684610\|gb\|GW780550.1\|GW780550_PBC025D02_04978_Parthenium_ |
| | argentatum_cold_acclimated_bark_cDNA_library_(PAB)_Parthenium_argentatum_ |
| | cDNA_clone_PBC025D02,_mRNA_sequence |
| 430 | gi\|294684572\|gb\|GW780512.1\|GW780512_PBC024H08_04940_Parthenium_ |
| | argentatum_cold_acclimated_bark_cDNA_library_(PAB)_Parthenium_argentatum_ |
| | cDNA_clone_PBC024H08,_mRNA_sequence |
| 431 | gi\|294682355\|gb\|GW783666.1\|GW783666_PBC060C12_08094_Parthenium_ |
| | argentatum_cold_acclimated_bark_cDNA_library_(PAB)_Parthenium_argentatum_ |
| | cDNA_clone_PBC060C12,_mRNA_sequence |
| 432 | gi\|294682350\|gb\|GW783661.1\|GW783661_PBC060C06_08089_Parthenium_ |
| | argentatum_cold_acclimated_bark_cDNA_library_(PAB)_Parthenium_argentatum_ |
| | cDNA_clone_PBC060C06,_mRNA_sequence |
| 433 | gi\|294682348\|gb\|GW783639.1\|GW783659_PBC060C05_08087_Parthenium_ |
| | argentatum_cold_acclimated_bark_cDNA_library_(PAB)_Parthenium_argentatum_ |
| | cDNA_clone_PBC060C05,_mRNA_sequence |
| 434 | gi\|294682308\|gb\|GW783619.1\|GW783619_PBC059G11_08047_Parthenium_ |
| | argentatum_cold_acclimated_bark_cDNA_library_(PAB)_Parthenium_argentatum_ |
| | cDNA_clone_PBC059G11,_mRNA_sequence |
| 435 | gi\|294682283\|gb\|GW783594.1\|GW783594_PBC059E10_08022_Parthenium_ |
| | argentatum_cold_acclimated_bark_cDNA_library_(PAB)_Parthenium_argentatum_ |
| | cDNA_clone_PBC059E10,_mRNA_sequence |
| 436 | gi\|294682255\|gb\|GW777957.1\|GW777957_PAB928D03_02385_Parthenium_ |
| | argentatum_cold_acclimated_bark_cDNA_library_(PAB)_Parthenium_argentatum_ |
| | cDNA_clone_PAB928D03,_mRNA_sequence |
| 437 | gi\|294682255\|gb\|GW777957.1\|GW777957_PAB928D03_02385_Parthenium_ |
| | argentatum_cold_acclimated_bark_cDNA_library_(PAB)_Parthenium_argentatum_ |
| | cDNA_clone_PAB928D03,_mRNA_sequence |
| 438 | gi\|294682242\|gb\|GW777944.1\|GW777944_PAB928E09_02372_Parthenium_ |
| | argentatum_cold_acclimated_bark_cDNA_library_(PAB)_Parthenium_argentatum_ |
| | cDNA_clone_PAB928E09,_mRNA_sequence |
| 439 | gi\|294682210\|gb\|GW777912.1\|GW777912_PAB928B08_02340_Parthenium_ |
| | argentatum_cold_acclimated_bark_cDNA_library_(PAB)_Parthenium_argentatum_ |
| | cDNA_clone_PAB928B08,_mRNA_sequence |
| 440 | gi\|294682207\|gb\|GW777909.1\|GW777909_PAB928B12_02337_Parthenium_ |
| | argentatum_cold_acclimated_bark_cDNA_library_(PAB)_Parthenium_argentatum_ |
| | cDNA_clone_PAB928B12,_mRNA_sequence |
| 441 | gi\|294682206\|gb\|GW777908.1\|GW777908_PAB928H07_02336_Parthenium_ |
| | argentatum_cold_acclimated_bark_cDNA_library_(PAB)_Parthenium_argentatum_ |
| | cDNA_clone_PAB928H07,_mRNA_sequence |
| 442 | gi\|294682202\|gb\|GW777904.1\|GW777904_PAB928G04_02332_Parthenium_ |
| | argentatum_cold_acclimated_bark_cDNA_library_(PAB)_Parthenium_argentatum_ |
| | cDNA_clone_PAB928H07,_mRNA_sequence |
| 443 | gi\|294682201\|gb\|GW783591.1\|GW783591_PBC059E7_08019_Parthenium_ |
| | argentatum_cold_acclimated_bark_cDNA_library_(PBC)_Parthenium_argentatum_ |
| | cDNA_clone_PBC059E7,_mRNA_sequence |
| 444 | gi\|294682193\|gb\|GW783583.1\|GW783583_PBC059D11_08011_Parthenium_ |
| | argentatum_cold_acclimated_bark_cDNA_library_(PBC)_Parthenium_argentatum_ |
| | cDNA_clone_PBC059D11,_mRNA_sequence |
| 445 | gi\|294682146\|gb\|GW783536.1\|GW783536_PBC058H08_07964_Parthenium_ |
| | argentatum_cold_acclimated_bark_cDNA_library_(PBC)_Parthenium_argentatum_ |
| | cDNA_clone_PBC058H08,_mRNA_sequence |
| 446 | gi\|294682119\|gb\|GW777900.1\|GW777900_PAB928F01_02328_Parthenium_ |
| | argentatum_cold_acclimated_bark_cDNA_library_(PAB)_Parthenium_argentatum_ |
| | cDNA_clone_PAB928F01,_mRNA_sequence |
| 447 | gi\|294682078\|gb\|GW777859.1\|GW777859_PAB927A11_02287_Parthenium_ |
| | argentatum_cold_acclimated_bark_cDNA_library_(PAB)_Parthenium_argentatum_ |
| | cDNA_clone_PAB927A11,_mRNA_sequence |
| 448 | gi\|294681980\|gb\|GW783475.1\|GW783475_PBC058C05_07903_Parthenium_ |
| | argentatum_cold_acclimated_bark_cDNA_library_(PBC)_Parthenium_argentatum_ |
| | cDNA_clone_PBC058C05,_mRNA_sequence |
| 449 | gi\|294681885\|gb\|GW777771.1\|GW777771_PAB926F01_02199_Parthenium_ |
| | argentatum_cold_acclimated_bark_cDNA_library_(PAB)_Parthenium_argentatum_ |
| | cDNA_clone_PAB926F01,_mRNA_sequence |
| 450 | gi\|294681867\|gb\|GW777753.1\|GW777753_PAB926C02_02181_Parthenium_ |
| | argentatum_cold_acclimated_bark_cDNA_library_(PAB)_Parthenium_argentatum_ |
| | cDNA_clone_PAB926C02,_mRNA_sequence |
| 451 | gi\|294681865\|gb\|GW777751.1\|GW777751_PAB926F04_02179_Parthenium_ |
| | argentatum_cold_acclimated_bark_cDNA_library_(PAB)_Parthenium_argentatum_ |
| | cDNA_clone_PAB926F04,_mRNA_sequence |
| 452 | gi\|294681827\|gb\|GW783401.1\|GW783401_PBC057D07_07829_Parthenium_ |
| | argentatum_cold_acclimated_bark_cDNA_library_(PBC)_Parthenium_argentatum_ |
| | cDNA_clone_PBC057D07,_mRNA_sequence |
| 453 | gi\|294681819\|gb\|GW783393.1\|GW783393_PBC057C11_07821_Parthenium_ |
| | argentatum_cold_acclimated_bark_cDNA_library_(PBC)_Parthenium_argentatum_ |
| | cDNA_clone_PBC057C11,_mRNA_sequence |
| 454 | gi\|294681804\|gb\|GW783378.1\|GW783378_PBC057B06_07806_Parthenium_ |
| | argentatum_cold_acclimated_bark_cDNA_library_(PBC)_Parthenium_argentatum_ |
| | cDNA_clone_PBC057B06,_mRNA_sequence |
| 455 | gi\|294681793\|gb\|GW783367.1\|GW783367_PBC057A07_07795_Parthenium_ |
| | argentatum_cold_acclimated_bark_cDNA_library_(PBC)_Parthenium_argentatum_ |
| | cDNA_clone_PBC057A07,_mRNA_sequence |
| 456 | gi\|294681793\|gb\|GW783367.1\|GW783367_PBC057A07_07795_Parthenium_ |
| | argentatum_cold_acclimated_bark_cDNA_library_(PBC)_Parthenium_argentatum_ |
| | cDNA_clone_PBC057A07,_mRNA_sequence |
| 457 | gi\|294681771\|gb\|GW777710.1\|GW777710_PAB926E02_02138_Parthenium_ |
| | argentatum_cold_acclimated_bark_cDNA_library_(PAB)_Parthenium_argentatum_ |
| | cDNA_clone_PAB926E02,_mRNA_sequence |
| 458 | gi\|294681755\|gb\|GW777694.1\|GW777694_PAB925E08_02122_Parthenium_ |
| | argentatum_cold_acclimated_bark_cDNA_library_(PAB)_Parthenium_argentatum_ |
| | cDNA_clone_PAB925E08,_mRNA_sequence |
| 459 | gi\|294681754\|gb\|GW777693.1\|GW777693_PAB925H05_02121_Parthenium_ |
| | argentatum_cold_acclimated_bark_cDNA_library_(PAB)_Parthenium_argentatum_ |
| | cDNA_clone_PAB925H05,_mRNA_sequence |
| 460 | gi\|294681732\|gb\|GW777671.1\|GW777671_PAB925A10_02099_Parthenium_ |
| | argentatum_cold_acclimated_bark_cDNA_library_(PAB)_Parthenium_argentatum_ |
| | cDNA_clone_PAB925A10,_mRNA_sequence |
| 461 | gi\|294681689\|gb\|GW783316.1\|GW783316_PBC056E05_07744_Parthenium_ |
| | argentatum_cold_acclimated_bark_cDNA_library_(PBC)_Parthenium_argentatum_ |
| | cDNA_clone_PBC056E05,_mRNA_sequence |
| 462 | gi\|294681679\|gb\|GW783306.1\|GW783306_PBC056C12_07734_Parthenium_ |
| | argentatum_cold_acclimated_bark_cDNA_library_(PBC)_Parthenium_argentatum_ |
| | cDNA_clone_PBC056C12,_mRNA_sequence |
| 463 | gi\|294681675\|gb\|GW783302.1\|GW783302_PBC056C08_07730_Parthenium_ |
| | argentatum_cold_acclimated_bark_cDNA_library_(PBC)_Parthenium_argentatum_ |
| | cDNA_clone_PBC056C08,_mRNA_sequence |
| 464 | gi\|294681672\|gb\|GW783299.1\|GW783299_PBC056C05_07727_Parthenium_ |
| | argentatum_cold_acclimated_bark_cDNA_library_(PBC)_Parthenium_argentatum_ |
| | cDNA_clone_PBC056C05,_mRNA_sequence |
| 465 | gi\|294681617\|gb\|GW777635.1\|GW777635_PAB925A11_02063_Parthenium_ |
| | argentatum_cold_acclimated_bark_cDNA_library_(PAB)_Parthenium_argentatum_ |
| | cDNA_clone_PAB925A11,_mRNA_sequence |
| 466 | gi\|294681599\|gb\|GW777617.1\|GW777617_PAB925D02_02045_Parthenium_ |
| | argentatum_cold_acclimated_bark_cDNA_library_(PAB)_Parthenium_argentatum_ |
| | cDNA_clone_PAB925D02,_mRNA_sequence |
| 467 | gi\|294681573\|gb\|GW777591.1\|GW777591_PAB924D01_02019_Parthenium_ |
| | argentatum_cold_acclimated_bark_cDNA_library_(PAB)_Parthenium_argentatum_ |
| | cDNA_clone_PAB924D01,_mRNA_sequence |
| 468 | gi\|294681573\|gb\|GW777591.1\|GW777591_PAB924D01_02019_Parthenium_ |
| | argentatum_cold_acclimated_bark_cDNA_library_(PAB)_Parthenium_argentatum_ |
| | cDNA_clone_PAB924D01,_mRNA_sequence |
| 469 | gi\|294681516\|gb\|GW783222.1\|GW783222_PBC055B08_07650_Parthenium_ |
| | argentatum_cold_acclimated_bark_cDNA_library_(PBC)_Parthenium_argentatum_ |
| | cDNA_clone_PBC055B08,_mRNA_sequence |
| 470 | gi\|294681491\|gb\|GW783197.1\|GW783197_PBC054G11_07625_Parthenium_ |
| | argentatum_cold_acclimated_bark_cDNA_library_(PBC)_Parthenium_argentatum_ |
| | cDNA_clone_PBC054G11,_mRNA_sequence |
| 471 | gi\|294681474\|gb\|GW777571.1\|GW777571_PAB924A11_01999_Parthenium_ |
| | argentatum_cold_acclimated_bark_cDNA_library_(PAB)_Parthenium_argentatum_ |
| | cDNA_clone_PAB924A11,_mRNA_sequence |
| 472 | gi\|294681452\|gb\|GW777549.1\|GW777549_PAB924C04_01977_Parthenium_ |
| | argentatum_cold_acclimated_bark_cDNA_library_(PAB)_Parthenium_argentatum_ |
| | cDNA_clone_PAB924C04,_mRNA_sequence |
| 473 | gi\|294681395\|gb\|GW783180.1\|GW783180_PBC054F05_07608_Parthenium_ |
| | argentatum_cold_acclimated_bark_cDNA_library_(PBC)_Parthenium_argentatum_ |
| | cDNA_clone_PBC054F05,_mRNA_sequence |
| 474 | gi\|294681374\|gb\|GW783159.1\|GW783159_PBC054D08_07587_Parthenium_ |
| | argentatum_cold_acclimated_bark_cDNA_library_(PBC)_Parthenium_argentatum_ |
| | cDNA_clone_PBC054D08,_mRNA_sequence |
| 475 | gi\|294681372\|gb\|GW783157.1\|GW783157_PBC054D06_07585_Parthenium_ |
| | argentatum_cold_acclimated_bark_cDNA_library_(PBC)_Parthenium_argentatum_ |
| | cDNA_clone_PBC054D06,_mRNA_sequence |
| 476 | gi\|294681365\|gb\|GW783150.1\|GW783150_PBC054C11_07578_Parthenium_ |
| | argentatum_cold_acclimated_bark_cDNA_library_(PBC)_Parthenium_argentatum_ |
| | cDNA_clone_PBC054C11,_mRNA_sequence |
| 477 | gi\|29468132\|gb\|GW777497.1\|GW777497_PAB923B03_01925_Parthenium_ |
| | argentatum_cold_acclimated_bark_cDNA_library_(PAB)_Parthenium_argentatum_ |
| | cDNA_clone_PAB923B03,_mRNA_sequence |
| 478 | gi\|294681286\|gb\|GW777462.1\|GW777462_PAB923B04_01890_Parthenium_ |
| | argentatum_cold_acclimated_bark_cDNA_library_(PAB)_Parthenium_argentatum_ |
| | cDNA_clone_PAB923B04,_mRNA_sequence |
| 479 | gi\|294681285\|gb\|GW777461.1\|GW777461_PAB923E01_01889_Parthenium_ |
| | argentatum_cold_acclimated_bark_cDNA_library_(PAB)_Parthenium_argentatum_ |
| | cDNA_clone_PAB923E01,_mRNA_sequence |
| 480 | gi\|294681284\|gb\|GW777460.1\|GW777460_PAB923B09_01888_Parthenium_ |
| | argentatum_cold_acclimated_bark_cDNA_library_(PAB)_Parthenium_argentatum_ |
| | cDNA_clone_PAB923B09,_mRNA_sequence |
| 481 | gi\|294681261\|gb\|GW777437.1\|GW777437_PAB923A04_01865_Parthenium_ |
| | argentatum_cold_acclimated_bark_cDNA_library_(PAB)_Parthenium_argentatum_ |
| | cDNA_clone_PAB923A04,_mRNA_sequence |
| 482 | gi\|294681250\|gb\|GW783114.1\|GW783114_PBC053H07_07542_Parthenium_ |
| | argentatum_cold_acclimated_bark_cDNA_library_(PBC)_Parthenium_argentatum_ |
| | cDNA_clone_PBC053H,_mRNA_sequence |
| 483 | gi\|294681220\|gb\|GW783084.1\|GW783084_PBC053E11_07512_Parthenium_ |
| | argentatum_cold_acclimated_bark_cDNA_library_(PBC)_Parthenium_argentatum_ |
| | cDNA_clone_PBC053E11,_mRNA_sequence |
| 484 | gi\|294681216\|gb\|GW783080.1\|GW783080_PBC053E07_07508_Parthenium_ |
| | argentatum_cold_acclimated_bark_cDNA_library_(PBC)_Parthenium_argentatum_ |
| | cDNA_clone_PBC053E07,_mRNA_sequence |
| 485 | gi\|294681215\|gb\|GW783079.1\|GW783079_PBC053E05_07507_Parthenium_ |
| | argentatum_cold_acclimated_bark_cDNA_library_(PBC)_Parthenium_argentatum_ |
| | cDNA_clone_PBC053E05,_mRNA_sequence |
| 486 | gi\|294681151\|gb\|GW777406.1\|GW777406_PAB922D05_01834_Parthenium_ |
| | argentatum_cold_acclimated_bark_cDNA_library_(PAB)_Parthenium_argentatum_ |
| | cDNA_clone_PAB922D05,_mRNA_sequence |
| 487 | gi\|294681117\|gb\|GW777372.1\|GW777372_PAB922D01_01800_Parthenium_ |
| | argentatum_cold_acclimated_bark_cDNA_library_(PAB)_Parthenium_argentatum_ |
| | cDNA_clone_PAB922D01,_mRNA_sequence |
| 488 | gi\|294681117\|gb\|GW777372.1\|GW777372_PAB922D011_01800_Parthenium_ |
| | argentatum_cold_acclimated_bark_cDNA_library_(PAB)_Parthenium_argentatum_ |
| | cDNA_clone_PAB922D01,_mRNA_sequence |
| 489 | gi\|294681109\|gb\|GW777364.1\|GW777364_PAB922C08_01792_Parthenium_ |
| | argentatum_cold_acclimated_bark_cDNA_library_(PAB)_Parthenium_argentatum_ |
| | cDNA_clone_PAB922C08,_mRNA_sequence |
| 490 | gi\|294680332\|gb\|GW786118.1\|GW786118_PBC087F05_10546_Parthenium_ |
| | argentatum_cold_acclimated_bark_cDNA_library_(PBC)_Parthenium_argentatum_ |
| | cDNA_clone_PBC087F05,_mRNA_sequence |
| 491 | gi\|294680324\|gb\|GW786110.1\|GW786110_PBC087E05_10538_Parthenium_ |
| | argentatum_cold_acclimated_bark_cDNA_library_(PBC)_Parthenium_argentatum_ |
| | cDNA_clone_PBC087E05,_mRNA_sequence |
| 492 | gi\|294680319\|gb\|GW786105.1\|GW786105_PBC087D11_10533_Parthenium_ |
| | argentatum_cold_acclimated_bark_cDNA_library_(PBC)_Parthenium_argentatum_ |
| | cDNA_clone_PBC087D11,_mRNA_sequence |
| 493 | gi\|294680301\|gb\|GW78607.1\|GW786087_PBC087C05_10515_Parthenium_ |
| | argentatum_cold_acclimated_bark_cDNA_library_(PBC)_Parthenium_argentatum_ |
| | cDNA_clone_PBC087C05,_mRNA_sequence |
| 494 | gi\|294680277\|gb\|GW786063.1\|GW786063_PBC087A05_10491_Parthenium_ |
| | argentatum_cold_acclimated_bark_cDNA_library_(PBC)_Parthenium_argentatum_ |
| | cDNA_clone_PBC087A05,_mRNA_sequence |
| 495 | gi\|294680260\|gb\|GW786046.1\|GW786046_PBC086G08_10474_Parthenium_ |
| | argentatum_cold_acclimated_bark_cDNA_library_(PBC)_Parthenium_argentatum_ |
| | cDNA_clone_PBC086G08,_mRNA_sequence |
| 496 | gi\|294680255\|gb\|GW786041.1\|GW786041_PBC086G05_10469_Parthenium_ |
| | argentatum_cold_acclimated_bark_cDNA_library_(PBC)_Parthenium_argentatum_ |
| | cDNA_clone_PBC086G05,_mRNA_sequence |
| 497 | gi\|294680202\|gb\|GW785988.1\|GW785988_PBC086B05_10416_Parthenium_ |
| | argentatum_cold_acclimated_bark_cDNA_library_(PCB)_Parthenium_argentatum_ |
| | cDNA_clone_PBC086B05,_mRNA_sequence |
| 498 | gi\|294680186\|gb\|GW785972.1\|GW785972_PBC085H10_10400_Parthenium_ |
| | argentatum_cold_acclimated_bark_cDNA_library_(PBC)_Parthenium_argentatum_ |
| | cDNA_clone_PBC085H10,_mRNA_sequence |
| 499 | gi\|294680182\|gb\|GW785968.1\|GW785968_PBC085H06_10396_Parthenium_ |
| | argentatum_cold_acclimated_bark_cDNA_library_(PBC)_Parthenium_argentatum_ |
| | cDNA_clone_PBC085H06,_mRNA_sequence |
| 500 | gi\|294680172\|gb\|GW785958.1\|GW785958_PBC085G07_10386_Parthenium_ |
| | argentatum_cold_acclimated_bark_cDNA_library_(PBC)_Parthenium_argentatum_ |
| | cDNA_clone_PBC085G07,_mRNA_sequence |
| 501 | gi\|294680162\|gb\|GW785948.1\|GW785948_PBC085F08_10376_Parthenium_ |
| | argentatum_cold_acclimated_bark_cDNA_library_(PBC)_Parthenium_argentatum_ |
| | cDNA_clone_PBC085F08,_mRNA_sequence |
| 502 | gi\|294680142\|gb\|GW785928.1\|GW785928_PBC085D11_10356_Parthenium_ |
| | argentatum_cold_acclimated_bark_cDNA_library_(PBC)_Parthenium_argentatum_ |
| | cDNA_clone_PBC085D11,_mRNA_sequence |
| 503 | gi\|294680119\|gb\|GW785905.1\|GW785905_PBC085B09_10333_Parthenium_ |
| | argentatum_cold_acclimated_bark_cDNA_library_(PBC)_Parthenium_argentatum_ |
| | cDNA_clone_PBC085B09,_mRNA_sequence |
| 504 | gi\|294680098\|gb\|GW785884.1\|GW785884_PBC084H12_10312_Parthenium_ |
| | argentatum_cold_acclimated_bark_cDNA_library_(PBC)_Parthenium_argentatum_ |
| | cDNA_clone_PBC084H12,_mRNA_sequence |
| 505 | gi\|294680070\|gb\|GW785856.1\|GW785856_PBC084F08_10284_Parthenium_ |
| | argentatum_cold_acclimated_bark_cDNA_library_(PBC)_Parthenium_argentatum_ |
| | cDNA_clone_PBC084F08,_mRNA_sequence |
| 506 | gi\|294680060\|gb\|GW785846.1\|GW785846_PBC0894E10_10274_Parthenium_ |
| | argentatum_cold_acclimated_bark_cDNA_library_(PBC)_Parthenium_argentatum_ |
| | cDNA_clone_PBC084E10,_mRNA_sequence |
| 507 | gi\|294680038\|gb\|GW785824.1\|GW785824_PBC084C10_10252_Parthenium_ |
| | argentatum_cold_acclimated_bark_cDNA_library_(PBC)_Parthenium_argentatum_ |
| | cDNA_clone_PBC084C10,_mRNA_sequence |
| 508 | gi\|294680031\|gb\|GW785817.1\|GW785817_PBC084C05_10245_Parthenium_ |
| | argentatum_cold_acclimated_bark_cDNA_library_(PBC)_Parthenium_argentatum_ |
| | cDNA_clone_PBC084C05,_mRNA_sequence |
| 509 | gi\|294680009\|gb\|GW785795.1\|GW785795_PBC084A05_10233_Parthenium_ |
| | argentatum_cold_acclimated_bark_cDNA_library_(PBC)_Parthenium_argentatum_ |
| | cDNA_clone_PBC084A05,_mRNA_sequence |
| 510 | gi\|294680009\|gb\|GW785795.1\|GW785795_PBC084A05_10223_Parthenium_ |
| | argentatum_cold_acclimated_bark_cDNA_library_(PBC)_Parthenium_argentatum_ |
| | cDNA_clone_PBC084A05,_mRNA_sequence |
| 511 | gi\|294679929\|gb\|GW785715.1\|GW785715_PBC083B05_10143_Parthenium_ |
| | argentatum_cold_acclimated_bark_cDNA_library_(PBC)_Parthenium_argentatum_ |
| | cDNA_clone_PBC083B05,_mRNA_sequence |
| 512 | gi\|294679926\|gb\|GW785712.1\|GW785712_PBC083A12_10140_Parthenium_ |
| | argentatum_cold_acclimated_bark_cDNA_library_(PBC)_Parthenium_argentatum_ |
| | cDNA_clone_PBC083A12,_mRNA_sequence |
| 513 | gi\|294679879\|gb\|GW785665.1\|GW785665_PBC082E07_10093_Parthenium_ |
| | argentatum_cold_acclimated_bark_cDNA_library_(PBC)_Parthenium_argentatum_ |
| | cDNA_clone_PBC082E07,_mRNA_sequence |
| 514 | gi\|29467853\|gb\|GW785639.1\|GW785639_PBC082C05_10067_Parthenium_ |
| | argentatum_cold_acclimated_bark_cDNA_library_(PBC)_Parthenium_argentatum_ |
| | cDNA_clone_PBC082C05,_mRNA_sequence |
| 515 | gi\|294679832\|gb\|GW785618.1\|GW785618_PBC082A07_10046_Parthenium_ |
| | argentatum_cold_acclimated_bark_cDNA_library_(PBC)_Parthenium_argentatum_ |
| | cDNA_clone_PBC082A07,_mRNA_sequence |

| Sequence | | TM | | TM | Product | |
|---|---|---|---|---|---|---|
| ID | Forward | Forward | Reverse | Reverse | Size | Repeat |
| 1 | GAAACCATGGCAAAACCC | 58.745 | TGCTGACTGATACTGCTGGA | 58.081 | 210 | (TAA)4- |
| | | | | | | (CCA)4 |
| 2 | ATCTGAACCCAGAACCCTTC | 58.021 | GGTTATCTGAGAAGCCAGCA | 58.048 | 285 | (ATG)4 |
| 3 | CTCAAAAGCACCACCCTTAG | 57.486 | GTGGTGAGTCGTTTTTGGTC | 58.029 | 209 | (CAC)5- |
| | | | | | | (CCT)5- |
| | | | | | | (CCT)5 |
| 4 | CTCTTCGAACGGTCTGAAAC | 57.514 | ATAGGGGATTCTCGTAACCG | 58.02 | 102 | (AAT)5 |
| 5 | TACCCTCCTCAGACCCTACC | 58.05 | GATTTCGGGCTAAAGAGGTC | 57.875 | 221 | (ATG)4 |
| 6 | CACCTACCTTCTTTTGGCCT | 58.318 | GCAACGTTAAAGACGGTGAC | 58.283 | 177 | (GA)7 |
| 7 | CCGTAGGTACAACACCGAAC | 58.008 | GGGGGAGAAAGAGAGAAACA | 58.296 | 333 | (ATC)4 |
| 8 | GAACTGGCTGTGAATGCTCT | 58.028 | ACTTTCACACAACGTCCTCC | 57.609 | 166 | (AC)8 |
| 9 | GAACTGGCTGTGAATGCTCT | 58.028 | ACTTTCACACAACGTCCTCC | 57.609 | 166 | (AT)7 |
| 10 | GCTCCAGTACGATTACGACG | 58.406 | GGCACTTTAAGGAGCTGTGA | 58.104 | 174 | (ATT)4 |
| 11 | CATCACCTTCTTCATCCCAC | 57.91 | CATTAGGAGGTGGAAACCCT | 57.975 | 480 | (TCA)4 |
| 12 | CCCTCCTCAGACCCTATCAT | 57.993 | TGACATAAGGAGCCCAGTGT | 58.158 | 279 | (ATG)4 |
| 13 | CCCAATGCTCTTCCTTCTTC | 58.861 | AGAGGAATTACTGAGGGCGT | 57.881 | 275 | (CCA)4 |
| 14 | GTCTTCCTTCCGCATGTCT | 57.793 | GATCAGCGGCAAGTAGTGTT | 57.979 | 148 | (TC)6 |
| 15 | TCATAGCCAGAGAGACTGCC | 58.129 | GCTTCTCTAAACTGGCCACA | 58.104 | 147 | (GCT)4 |
| 16 | GGAGGTCAGGAACTCAGGAT | 58.101 | GTGCTTGCTGTCAGCTTATG | 57.244 | 352 | (CTT)4 |
| 17 | CCATCATATGTCCCAAAGAG | 58.071 | TGAGCTAACGCCACATCT | 55.278 | 293 | (CTT)4 |
| 18 | TCCTCCTAAATCCTCGTTCC | 58.187 | CGGCTGTGAAGTGAAATACC | 58.228 | 460 | (TAT)4 |
| 19 | ATCTTCTTCTTCGTCCCACC | 58.173 | ACCTCGGGGATTTCTACAAC | 57.974 | 145 | (CTT)4 |
| 20 | CCACTCCTCCAAAACCTTCT | 58.228 | GAACCATCGGTACGATTCTG | 58.019 | 354 | (TAC)4 |
| 21 | GGGTTTCATCCTCCTCACTT | 58.021 | TGGGATAACTCTAGCCACCA | 58.173 | 463 | (AGG)5 |
| 22 | CATTATCAGTAGGCTGGGGA | 57.641 | AGCCGATGTACACTTCG | 57.98 | 480 | (TTA)4 |
| 23 | GCCGAAGAAGACCTGTATGT | 57.824 | ATCTCCTCCTTCAACGCTTC | 58.173 | 187 | (TAA)4 |
| 24 | GTTCTTCTCCGGTTATGGGT | 57.974 | CAGTACCAGTTCCAGTTCCG | 58.215 | 240 | (ATA)4 |
| 25 | AGGACAGCTACACAAGTGGC | 57.958 | CACTCCCACCATTGAAAGTC | 57.971 | 397 | (AAG)5 |
| 26 | GACGCCGTATTACAATCCAC | 579 | CAACCCCATCAACAACCAC | 59.641 | 260 | (TCG)4 |
| 27 | CACCCGAGTCCATCAAAA | 57.927 | ATAGAGCGTGGCATAGTTGG | 57.877 | 157 | (GAT)4 |
| 28 | CCCACTGGAACCCTAATCTT | 57.975 | TACAGCTCCGACTGACAACA | 57.977 | 183 | (GTG)4 |
| 29 | ATGTATGATGCTAGCGGCTC | 57.969 | CAGGATCTGGAAACTCATCG | 58.23 | 310 | (AAT)4 |
| 30 | GTATGAGGGCTTCAGGGATT | 58.067 | CACCAATAGAAGTGGCAACC | 58.076 | 349 | (GAT)6 |
| 31 | CCCTTGCTTCCACATAACAG | 58.228 | ACCAACCTCATCTTCTGACG | 57.71 | 426 | (TGC)4 |
| 32 | ACTGCCAGAAGTGTTTCCAG | 57.93 | ACCTGATTCCGACCTAGACC | 58.049 | 266 | (AAC)4 |
| 33 | AAGTACCGACCTGGTTGACA | 58.059 | ACATGCTCCACCTCCTTGTA | 58.158 | 378 | (TGA)6 |
| 34 | AAGAGGAACTCAAGAAGCG | 58.67 | AGACTGTGATTCAGGCTTCG | 58.029 | 497 | (GAT)5 |
| 35 | AGTGGATCATGTCTTGCTGC | 58.832 | ACCTTCACTCACAAAGCTCG | 58.087 | 188 | (CCA)5 |
| 36 | CTTGCCCTTTCTGTACGCTA | 58.201 | GCCATCTTTGGAGTAAAGGG | 58.646 | 478 | (TGAG) |
| | | | | | | GA)4 |
| 37 | CACTCCTTCAGTGACCTCCT | 56.817 | CAAACAGGAGAGCAGAAAGC | 57.826 | 224 | (TTGA)4 |
| 38 | GGCAAAATCAGGTACTTCCC | 58.504 | GCTCTCAAGTTACTGCAGCC | 57.853 | 194 | (TTA)4 |
| 39 | GAACCATTATGCAGCTGGTC | 58.173 | GCCTCCAGTAGTGGTAGCAA | 57.98 | 192 | (GGT)7 |
| 40 | CGATACACCTTCAAACGGAG | 58.228 | GACGGTGGAGATGGTTGTAG | 58 | 203 | (CCG)4 |
| 41 | ATACAGGTCACTGGCTCTCG | 57.9 | ACCACCTTATGGCAAGGACT | 58.525 | 410 | (GAA)5 |
| 42 | TCCTTACAAACCCAACCC | 55.746 | TCTTCGAAACCGTAGACCAG | 57.952 | 474 | (AC)6 |
| 43 | CGAGGTACTTCCACACCAAC | 58.059 | AAGTTCGGCCCTATACTGCT | 57.985 | 217 | (TGC)4 |
| 44 | TAGGGTTTTCTCTGCGACTG | 58.105 | TTATGCTGACTTCCTCAGCC | 58.048 | 262 | (CAG)4 |
| 45 | TGTGCTCGGCAGTAGGTAAT | 58.406 | ATCGTTGTCCACTAGCTTCG | 57.98 | 450 | (TGC)5 |
| 46 | TGGAGGAGGGTTAAGGCTA | 57.759 | CGGTTAGGTCATTGATGGAG | 58.02 | 170 | (TCT)5 |
| 47 | CAACCACTCCTCCACATCTC | 58.052 | ACGGTGCACTGCTTACTTTC | 58.036 | 484 | (ATA)4 |
| 48 | CCCCCTCTTTGGTTGTAT | 57.975 | TTGTGTATCGACAGCTGCAC | 58.439 | 491 | (ATT)4 |
| 49 | CGAGCTCATCTTCGATCTTC | 57.706 | CCCATGAGATGACTTCAACC | 57.91 | 241 | (ATC)4 |
| 50 | ACGTCGCTTAAAGACACAGC | 58.187 | AGTGTCAAACGTGCCTAACC | 57.729 | 189 | (ACA)4 |
| 51 | GTCATGGTATCAGAGCCTTG | 55.672 | AGGGAGTAGCAAGGGAAGAA | 58.002 | 472 | (ACC)4 |
| 52 | CCTACCACCACCACCATAAA | 58.201 | GGGAGTAGCAAGGGAAGAAG | 58.002 | 398 | (GCC)5- |
| | | | | | | (GCC)4 |
| 53 | CCGACCTAAGCAAATCACAC | 58.228 | CATCTCCCTGTAATCGCTTG | 58.325 | 307 | (AAT)4 |
| 54 | CGTTCTAGTACCCCTCCCTC | 57.734 | TCAAATAGGTCGGAGACAGAC | 57.893 | 318 | (AAT)5 |
| 55 | TCAGAGCCTTGAAGACAACC | 58 | CACATGTATGTTGGTGACGCT | 58.246 | 146 | (ACC)4 |
| 56 | CACGGAGTGGTGATCAAAAGG | 58.13 | CTTTGTCCTTGCTCGTCTGT | 58.087 | 374 | (TGA)4 |
| 57 | ACTTGCCGTATGTGTGTGTG | 58.038 | CGGTAACCTGGAGGGTATTT | 57.93 | 310 | (AT)6 |
| 58 | CACACCCACTAGATCCATCC | 57.779 | CTGCTACAAGAACCGCTGAT | 58.132 | 399 | (TTA)4 |
| 59 | TCACTCTGGGTTCTTTCACC | 57.679 | CTTGTCGAATATCTGCCCAC | 58.173 | 228 | (TGG)5 |
| 60 | TCCCTCTCTTTACCACCCTT | 57.706 | CCGGTATTCTAAACTCCGGT | 58.072 | 398 | (CA)8 |
| 61 | CCTTTCACTCCACACACACA | 580.63 | GATCTCGACCTAGACATCCTTG | 57.881 | 456 | (TAA)4 |
| 62 | GGTGACAACAGGAAGTGAGC | 58.275 | ACCTCATCTTGTGGGTGGTA | 57.84 | 222 | (AAC)4 |
| 63 | CAGCCAGCAGTTAACCAGAT | 57.98 | CACCCAAAGAATAGCAGGTG | 58.228 | 210 | (GCT)4 |
| 64 | ACCTGTCAGAACAAGCCAA | 57.93 | TATTGAGGCCTCCTTCTCCT | 57.946 | 172 | (GATA)4 |
| 65 | CACAGACAGTCCCAAATCCT | 57.548 | ACAAGGTTCCTCATCTTCCC | 58.021 | 313 | (ATT)4 |
| 66 | CTTCCGATCTAGACGACGAA | 58.048 | CCACGTGTCAAGCCTTATTC | 58.228 | 128 | (GAA)4 |
| 67 | GTTGCTGTCGAAAACCCTG | 59.278 | TCAGCATGTTCCCTCTCTTC | 57.94 | 473 | (TTA)5 |
| 68 | ACTCTACCTCCATGCTGACG | 57.9 | CCTGGTTCAGAAGATTGCAC | 58.287 | 429 | (AAG)4 |
| 69 | GCCCTATGCTTCACTCCATA | 57.791 | AGGCTGAAGGTCTTCTCGTT | 58.133 | 414 | (GCAA |
| | | | | | | AC)4 |
| 70 | GAAGAGAAAGCAGCAGCGTA | 58.555 | TACCGACCCCTATCCCTATC | 57.821 | 440 | (CTT)6 |
| 71 | GAGGCTCAGGTCTTCCTTCT | 57.953 | CTCCTCCTTCTTCCTCT | 56.689 | 376 | (GAT)5- |
| | | | | | | (TAGA |
| | | | | | | GA)5 |
| 72 | ACTGGTCTTCGTTGCTGAAG | 58.087 | AAAGAAAGGGAGACAGGCAC | 58.377 | 416 | (TG)8 |
| 73 | CCCTCAAACCAAATCACTCC | 59.381 | GTACGAGGTTTCGGAGTACG | 57.36 | 226 | (CAC)4 |
| 74 | GGAGCAGGAGCATATGAGAA | 57.99 | ATAATACTTCACCGCCTCCC | 58.019 | 188 | (TAT)5 |
| 75 | CAAAGGCAGCAGAGAAG AAG | 57.98 | CAGCAGTCTGGATCTCCCTA | 57.971 | 336 | (AAG)4 |
| 76 | GCAGCTTAGACCCAGTCAAC | 57.542 | TATCTTCCCTGCAGTACCCA | 58.173 | 463 | (CAC)4 |
| 77 | CCTCTCCGAGTCAAAACGTA | 57.952 | TGGAAGGTGCTGTAGGTGAT | 58.158 | 134 | (TAA)5 |
| 78 | ATACAGAGGGGTCCGAAAA | 57.974 | TACACGTGGCAGAACACACT | 57.137 | 464 | (TCG)4 |
| 79 | CCCTTCATCCTCTCTCTCATC | 57.853 | CAGCTCGGATGACTCAAACT | 58.029 | 390 | (AG)8 |
| 80 | CGTGTCAAAACTACGGTCT | 58.036 | AAGCTTTGACCGACTTCCTC | 58.525 | 135 | (CACG)4 |
| 81 | CAGGATCAGAATCGGATGAC | 58.011 | ATAGCAAGGCACCAGAACAG | 57.98 | 125 | (TGA)5 |
| 82 | GATTAGAGCGTCATCGGCTA | 58.092 | TGTCCTGCCTTCTCAAAGAG | 58.158 | 433 | (GAT)4 |
| 83 | GCATATCCGATCCAACTCAC | 57.96 | CTGTAACACCGAGTCCCATC | 58 | 227 | (GAT)4 |
| 84 | GTACACAATGGGAGCGTGTT | 58.498 | GCTAGCCTCACATAGACCGA | 58.076 | 391 | (GGT)4 |
| 85 | ATCTCTTCCACCACTCCCTC | 58.101 | CTGCCTAGCAGCTAAGTTGG | 57.961 | 378 | (ACA)4 |
| 86 | GGAAGTTAAAGATCCGGCG | 59.654 | ATCTTGGACAGGGGAGAATC | 57.964 | 259 | (ATG)4 |
| 87 | TCTGACTCCATCCAGCCTTA | 58.387 | AATGACTCTACCAGCGCAAC | 57.979 | 228 | (CA)9- |
| | | | | | | (GAA)4 |
| 88 | GAACCCGCAGCAATAGAA | 57.346 | ACCTCGGGGATTTCTACAAC | 57.974 | 326 | (TC)6 |
| 89 | AGAGACGTCAACGGAAACAC | 57.77 | GTTCCACGTCATGTCTAGGG | 58 | 244 | (ACC)5 |
| 90 | GATTACTCGTTCAACGGTCG | 58.228 | AGGAGGAAAAAGGGGGTACT | 58.074 | 327 | (TAG)6 |
| 91 | CAGTGAAAAGTGATGTCCCC | 57.971 | CAGAACGTGTCATCGTCAGA | 58.341 | 313 | (AAT)4 |
| 92 | CGTTGACGGAAGGATATGAC | 58.019 | GCAGCTAAAATCCTCCTCCT | 57.639 | 206 | (GCA)4 |
| 93 | GTTCTAGCGTGTGATGCCTT | 57.979 | GAAAGAACTTGTCCCAGAGC | 56.536 | 407 | (CTC)4 |
| 94 | CCATTGGCTCTCCTTCCTAT | 58.214 | TAGTCCTGAAAGCCACCTTG | 57.952 | 342 | (TTG)4 |
| 95 | CGATGGTCTCCACTACCAAC | 58 | AGAAACAGCCATGAGACCAG | 57.87 | 411 | (TTC)4 |
| 96 | CTGGGTACGCTCGCATAG | 57.968 | TGGAAGACCGAGTGGTGTAT | 58 | 343 | (GAG)5 |
| 97 | AACAGGCAGTCAGACACCAT | 58.142 | GCATCATAGGCTGCAGAGAT | 58.018 | 302 | (ATT)4 |
| 98 | GTCTCCAATGACCAAGATGC | 58.07 | CTAAAGCCTGCGAGTTATCG | 57.837 | 118 | (CCT)4 |
| 99 | GAGGAGGCTGCAGTTGATAA | 58.048 | GACCACCACGCAATGTTT | 57.85 | 173 | (TTGGTG)4 |
| 100 | TTCAGTGTGGTTGTGCGA | 58.202 | TTAGCTCAAGAGGTGATGGC | 58.048 | 159 | (GT)9 |
| 101 | ACCGGATTATCTCCGATCTC | 58.011 | CATCATGGTTGATAGGAGCC | 57.961 | 472 | (TGT)4 |
| 102 | CCCACACCAGTTCCTTACAC | 57.901 | GTGCTTGTGCACTATGGTTG | 57.764 | 481 | (CCA)4 |
| 103 | GAGGACATGGTCGGTGATAG | 57.94 | GCTACAAATGAGATCCCCG | 58.103 | 230 | (ATT)4 |
| 104 | CCCTAGGTTTTCCGATCAGT | 58.121 | CCGTAACACCACTGGATCTC | 58 | 281 | (CAG)5 |
| 105 | CCGAACAACATCCTGAACAC | 58.984 | CTTGCAACTGCATCTGTCAC | 57.976 | 499 | (AAT)4 |
| 106 | AACCGTCGTAACGATGACTC | 57.669 | TCTTCCTCTCCGTCACATTC | 57.779 | 164 | (CAC)5- |
| | | | | | | (GAT)4 |
| 107 | ACGACATCTGGAGATTCACG | 58.671 | AGCAAGTCTAGGGTTTCCGT | 57.936 | 282 | (GCT)6 |
| 108 | GGTTAGGCACGTTTGACACT | 57.729 | CGGTGTTGTAGTGAACGTGA | 58.172 | 423 | (ATA)4 |
| 109 | CCATGACAGAAGTCCTCCAC | 58.052 | CAGGTTCAAACTCAACAGGC | 58.342 | 352 | (ATA)4 |
| 110 | AACCCTCCTGGATTTGGAC | 58.777 | CGTCTCGTAAGCGTTTCATC | 58.529 | 259 | (AACA)4 |
| 111 | TCGTTCGTCTCTTCTGCTTC | 58.315 | ACACCTTCTCCTTCCCAAAC | 58.078 | 455 | (CTG)4 |
| 112 | TCTCTGTTGGATACAGGGGA | 58.071 | AAAGCAAGGACGAGTAGGGT | 57.936 | 319 | (TAA)4 |
| 113 | GTCGTTGCTGATACTGCCTT | 57.979 | GAACAGTAGACGCCGAAGAA | 58.104 | 134 | (TGC)4 |
| 114 | CTGTCTGGGAACAAAACAGC | 58.342 | TCACTCCCCCTTTCCTATTC | 53.04 | 417 | (CAT)4 |
| 115 | GGTTTGAGTTTTCCCCCA | 58.302 | CTTGGTACGTTCGGTATTGG | 53.027 | 173 | (TA)7 |
| 116 | CGTTGCTGTCGCTCTCTAA | 57.882 | GTGCAACTCATCTCTTGCCT | 53.028 | 391 | (TC)8 |
| 117 | GAGTTCGAACCAAACACCAC | 58.029 | TACCAACAACAACACCCTCC | 53.315 | 337 | (ATG)4 |
| 118 | GCTGAAGCTGACCACACTTT | 58.087 | GCCCTATCAGAAACGAACAC | 57.265 | 434 | (TGG)4 |
| 119 | GAGCCTGAGAATGTTGCAGT | 58.028 | GTTTCTTAGGCGGCTTCTCT | 57.839 | 103 | (GAA)5 |
| 120 | CAGAGCTATCCTCAATCGGA | 57.991 | CGTTTTGTACCGTTACGGAG | 53.227 | 218 | (CAATTT)4 |
| 121 | CCTTTCAGGTGTCTGCACTT | 57.93 | CGTATTTCTCCACACCAACC | 57.923 | 253 | (TGA)6 |
| 122 | CCTGCACTCAGCTCCACTAT | 58.058 | GAACTAGCGGCTTTAGCCTT | 57.939 | 257 | (TGT)4 |
| 123 | CTTACTACGCCTCAGCATGG | 58.554 | TAGAATCTCATCTCCTGCGG | 57.991 | 491 | (TCC)4 |
| 124 | CAAACAGACCCACCAGTTGT | 58.463 | GTGTAGCCACATCAACCTCC | 57.999 | 414 | (TAT)4 |
| 125 | CGGTCAATCTTTGCGTTC | 57.743 | GGTGATGACCACTCCACTTC | 57.886 | 165 | (CAA)6 |
| 126 | CCTCTACACTTGCTAACCGC | 57.663 | GGTTGGTGTCTTGAAGGAGA | 57.679 | 128 | (TCC)4 |
| 127 | ATCCTCCTCCTCATCTGACC | 58.043 | CTCAACAGTCCACAGCCTTT | 57.93 | 338 | (GATTCC)4 |
| 128 | TATTCGAGAGTCGTTGAGCC | 58.048 | AAGAAACCCCCACTCTCATC | 58.021 | 182 | (GGATCA)4 |
| 129 | CTTCTTCCTCTTCACACACG | 55.987 | GCTTGTGTTGTGGTGGTGTA | 58.007 | 126 | (TTACAG)5 |
| 130 | CACGCCTTCTACGAGACATT | 57.98 | GATGAGGGAGATCTGTTTGG | 57.063 | 453 | (TCT)4 |
| 131 | CCCAACTAACCACCTTCTCTC | 57.776 | GGGTGGGTTTGAAGGAGTT | 58.828 | 111 | (CT)6 |
| 132 | CGACTTAACCCCTGGTTAGC | 58.718 | TTGGGTCTGGTACTGTTGGT | 57.901 | 150 | (CAA)4 |
| 133 | CCACCCAACCAATGTCTTAC | 57.768 | CAGCCTAAAAGATCCCTTCC | 57.876 | 426 | (AAC)6 |
| 134 | CACCTATTCTCGCACACACA | 58.276 | GGCCAACAAGTTATGTGAGG | 58.076 | 491 | (TTA)4 |
| 135 | CTGGTGGTATAACGGAGGTG | 57.952 | CAACACAGCACCACCAAA | 57.463 | 117 | (GTG)4 |
| 136 | CATCCGTAACACCACCAAGA | 59.415 | TGGTCTAACGGTGGTTGAGT | 58.059 | 184 | (CAC)4 |
| 137 | ATTCCGAGAGAGTTTGGACC | 58.173 | TGCTGTGACGAGACCAACTA | 57.977 | 233 | (CAC)4 |
| 138 | TACCCACAGTGGCTTCAACT | 58.215 | CCTCTAGTGCCCATCAAAGA | 57.894 | 181 | (AAT)5 |
| 139 | CGATCCCCCTTTCTCATATC | 58.401 | CTTTGGAGTACCGAAACCTG | 57.334 | 426 | (TTC)4 |
| 140 | CCTACGCTTTCTCTCATCCA | 58.048 | TTCTTGTGCGGCTACCTATC | 57.999 | 235 | (TCT)4 |
| 141 | GAGGTTCTGATCGTGAATGG | 58.071 | CGTGTCTCCCAATTTACCTG | 58.077 | 241 | (TCT)5 |
| 142 | TCACCTTCATACCCACCAGT | 57.84 | CCATGTAGAAAGATCCAGCG | 58.325 | 238 | (CAT)4 |
| 143 | ATAAACCCTCAACCCACTCC | 57.826 | CAACCTCAACAACCATCCTC | 57.971 | 439 | (CAAA)4 |
| 144 | TCCCAGGAGGTTCCTAAATC | 58.04 | ACCAGGATGTCAGATGCAGT | 58.082 | 263 | (TTG)4 |
| 145 | GCGTTAATCCGTTCCCTATG | 59.433 | AACACTAAGCCTCGGTTCCT | 57.936 | 373 | (CAA)4 |
| 146 | GCACTGCGTCACCTTACTTT | 58.036 | AACACCAATCACCTAGAGCG | 57.826 | 305 | (CT)9 |
| 147 | AGAAGAACTCGAAGAAGCCC | 57.732 | GATGAGGGAAGTGTGGTTGA | 58.482 | 159 | (CTC)4 |
| 148 | ACTGTGCTGAGAATGGGTGT | 58.142 | GCATAACAGGAAGAGCTCCA | 58.048 | 408 | (GGT)4 |
| 149 | CATCTCCGATCGATGGTAAC | 57.961 | AGGAATATGAAGAGGGTGGG | 57.919 | 363 | (TCA)5 |
| 150 | CCCCAGACCCTACCAATAAC | 58.24 | AGTCCCACATCAGTGCAAGT | 53.142 | 296 | (GTT)4 |
| 151 | CCCCAGACCCTACCAATAAC | 58.24 | AGTCCCACATCAGTGCAAGT | 53.142 | 296 | (TTA)4 |
| 152 | CAAGTACCGTTCTTCAAGCG | 58.579 | ATCAAAGTTACCCTCTCGGG | 58.121 | 391 | (ACA)4 |
| 153 | CGCCTCTCCAAACCTCTATT | 58.411 | ATAGGTACCGGGTTTTCAGC | 58.072 | 243 | (CAA)4 |
| 154 | GTTCGTTCGTCCATCGTATC | 58.019 | GGGTGAAGTATCCCTGCTTT | 53.121 | 401 | (ATT)4 |
| 155 | GCTACACTTTTTGCACGGG | 59.332 | ACCCGTGATTGTCTGTTACG | 53.497 | 406 | (ATT)4 |
| 156 | AGGGTTCTACACAAACACCG | 57.576 | TCGGTACTATCCACCTCCAA | 58.02 | 333 | (AGTTTT)4 |
| 157 | AGGCTATGAAGCTCCTGGAT | 57.973 | GAGGAGCAGACTTATCTAGCCA | 57.866 | 320 | (TGG)4- |
| | | | | | | (TGA)4 |
| 158 | ACGAAGACGACTCAGCAAAC | 58.087 | GAAGTATGTCTCTGCCGTGG | 58.315 | 122 | (CTT)4 |
| 159 | CCCCACTTTGCTACATTACG | 58.174 | TAATCTGCTCGTGCCCTAAC | 57.999 | 192 | (CAT)4 |
| 160 | TGCTGTCCCTTAGTTCTTGC | 58.104 | CAGGCTTGTGGTGATGGT | 57.934 | 174 | (CAC)5 |
| 161 | AACCCTAACTCGATCAACCC | 57.974 | GCGTTAGGTTGTGAAAGCTC | 57.632 | 260 | (CAA)4- |
| | | | | | | (CGA)5 |
| 162 | GGGAAACGAGTCCCCTAATA | 57.993 | GGGCATTCTTTTCAGGAGTC | 58.717 | 164 | (TCA)4 |
| 163 | ACCGTTCACCTCTCTCCTTC | 58.314 | CATCTGATATTCTGGGGCAG | 58.117 | 413 | (AAG)6 |
| 164 | GGGGACATACCATCACAGAA | 58.201 | CCAACAACACCACCCAAC | 58.108 | 230 | (AC)6 |
| 165 | CATCTTGAGGCTTGGTCTGT | 57.87 | AAAGGTTGTCTTGTGGGACC | 58.891 | 317 | (TG)6 |
| 166 | GTTCAAGCAGCTCCAACAGT | 58.087 | GAAGGAGATGGGTTGGTCTT | 58.021 | 207 | (GAG)4 |
| 167 | GTTCGGGTACGGTAAAACCT | 57.983 | ATAGCATGAACCACGAGTCC | 57.607 | 231 | (TTC)4 |
| 168 | CACACCCCTCTGATGAAATC | 57.91 | GTGTGCTGCTAAACGAAGGT | 58.036 | 479 | (TCT)5 |
| 169 | CAGAAACCACCCAACTCAAG | 58.187 | GAGAACATGTTGGGTGAAGG | 57.971 | 300 | (CAC)4 |
| 170 | GTGAAGTTGCAGCAGTTCCT | 58.087 | GCCCAGCAGCATATACCTTA | 57.898 | 339 | (GCT)4 |
| 171 | CTCATCCCTTCAAAACCC | 55.352 | GGTTTGGAAACTGGAGGTCT | 58.078 | 136 | (AAG)4 |
| 172 | TTAAGGTGGCTATGGAGCAG | 57.999 | AGGTCCGTGTTTTCCCTAAC | 58.029 | 199 | (GTG)5 |
| 173 | CGCGTACCGTATTACAACCT | 57.746 | GCAGAAGACGGAAGACTTTG | 57.671 | 434 | (ATA)5 |
| 174 | TGCTCCGTCTAAGAAAGCTC | 57.452 | CCTATAACCACCACGTCTCTC | 58 | 294 | (GCC)4 |
| 175 | GTACGGAGCTTTTGGAGTCA | 57.951 | CCGGCAAACTGCTAAGTCTA | 58.201 | 193 | (ATG)4 |
| 176 | CTACTTTTCCCCGGGTT | 58.895 | ACCCGTGATTGTCTGTTACG | 58.497 | 413 | (ATT)5 |
| 177 | GCGATCCAACAAACCATC | 57.338 | GTGGAGAGCTCGAGGTACAA | 58.029 | 154 | (TC)7 |
| 178 | CGATGGGAGTTCTCTAACGA | 57.894 | CAGCTGAACGTTTTCTCTCC | 57.671 | 337 | (CAG)5- |
| | | | | | | (GGT)4 |
| 179 | GATAAGATCCGCCGTCAAC | 58.102 | GAAGCAGAGAAACCTCCTCC | 58.049 | 500 | (AAC)4 |
| 180 | TCACCCCAAAACGATGTC | 57.755 | CACTAGAAACCAATCCACCG | 58.077 | 435 | (TCT)4 |
| 181 | CCTAACCCCACCTCTTGTTT | 58.029 | ATGAGGAGAGAGAGGCTGGT | 58.002 | 373 | (AG)6 |
| 182 | TCTACCGACAACCAAACCC | 58.401 | CCCTAACTTTGCTCCCTCTC | 58.002 | 247 | (AAG)5- |
| | | | | | | (CAT)4 |
| 183 | GCACACACACAGACACCAAT | 57.921 | CTGGCCAGATCTGTGTATCC | 58.1 | 244 | (CAA)4 |
| 184 | CCTCCCCTGTCTTTTCCTTA | 58.24 | AAAGATGGGATTCCAGGC | 57.422 | 314 | (CT)7 |
| 185 | TTAAGGAGGCGATAGTGACG | 57.999 | AGCTTTAGGAGGAGCTTTGG | 57.841 | 350 | (AAG)4- |
| | | | | | | (CAG)4 |
| 186 | ACTGCCACCAATAACACCAC | 58.343 | GGAATGGGAGTTCGGTTAGT | 57.974 | 114 | (ACC)4 |
| 187 | GTAGGGGTGTTCATTTGTGG | 57.768 | TACCCTCCTCAGACCCTACC | 58.05 | 211 | (CAT)5 |
| 188 | AGGTCCAACCCTTGGATAAG | 57.975 | GTGGTTTGGAGGTGAAGGAT | 58.842 | 310 | (CTTC)4 |
| 189 | CGTTGCAGAAGCTAGAAAGG | 57.934 | TCGCGTGATCTCTTCTGACT | 58.699 | 232 | (AAG)4 |
| 190 | GTGTCGTTTTGTAGATCGCC | 58.229 | GAATACAACTCTCCGACCGA | 57.737 | 190 | (CGA)4 |
| 191 | CGAGTGTCCAGGATAACGAT | 57.61 | ACAGTCTCCCACGTGTCATT | 57.979 | 354 | (ATA)6- |
| | | | | | | (AGG)4 |
| 192 | GTTTCCAACACTCAACCCAC | 57.87 | GCCTTCTTCCGTAGCTCTCT | 57.908 | 196 | (GT)8 |
| 193 | GTTTCCAACACTCAACCCAC | 57.87 | GACTTAAGCCCCAATTCCTC | 57.73 | 220 | (GA)8 |
| 194 | CTGGTAAAAAGGGTTCTCGG | 58.692 | GAATGATCGATTGCAGGC | 57.61 | 293 | (GAA)4- |
| | | | | | | (TGG)6 |
| 195 | CAAAGACCCACAAGCCAA | 58.156 | CACCTCCGTAGTCTTCTCCA | 57.871 | 322 | (AAT)5 |
| 196 | GTGTTCACAGGTCCCGTTAG | 58.059 | CTATTCACTCATTCCACCGC | 58.173 | 480 | (TAA)5 |
| 197 | CCATCTCCAGCATCCTAATG | 58.117 | GTGTGGTAGTGTGGGTGGAT | 58.112 | 201 | (CCA)4 |
| 198 | GTGTAGGGTTGCAGAGGTGT | 57.639 | AACGAGCTGCAATACCTGAC | 58.283 | 293 | (GAA)4 |
| 199 | GAATATGGGAGCAGTTGGTG | 58.019 | CTCAGTGTGGTTCCAAGACC | 58.113 | 403 | (CAG)4 |
| 200 | AGGAGGTCATGAAAGAAGGG | 58.173 | GTCGGGATTCATCTCTGCTA | 57.834 | 271 | (TGC)4 |
| 201 | CCACACTTAACTCCACGTGTC | 58.13 | GTCACTCCGCTTTGAAGTTG | 58.497 | 462 | (CTT)4 |
| 202 | ATCCTTCGGATAGTCACCC | 57.918 | GGATATGTTCAGCAAGTGGC | 58.173 | 403 | (GAT)4 |
| 203 | GTGTGAACCTTCACGGACTC | 58.112 | GTGACGACGGACGAATTAAC | 58.076 | 354 | (TAA)4 |
| 204 | CAAAGGGAGAAGGGGATAT | 58.451 | AGCCCTCTGAAACTGATTCC | 58.324 | 123 | (TCA)5 |
| 205 | TGGAACAGATGTCGGGTAGT | 58 | ACTGTTGCTTCTGCTTGGAC | 58.087 | 446 | (GTG)4 |
| 206 | GATCAAATATGGAGACCGCC | 59.348 | TAATCCGTATGCACTAGCCC | 57.752 | 289 | (CCA)5 |
| 207 | CAGTCGCCAGTTATTCAACC | 58.228 | AAAACCTCCAAGACCTCACC | 58.078 | 223 | (TCT)5 |
| 208 | CTTCATCGTCCGTACCAACA | 59.566 | GGAATTAGCTCTGCCTGATG | 57.515 | 435 | (TAC)6 |
| 209 | CGGCGAGAGAGAGACAGTAG | 57.93 | AATATCCTCCGTAACGCTC | 58.444 | 295 | (CT)9 |
| 210 | GTCTCCGTCAACGTCATCTC | 58.216 | CTTGTAACGGGATCACAACC | 57.923 | 442 | (TAA)5- |
| | | | | | | (TTA)4 |
| 211 | GGGACTGATATTGTGGTTGC | 57.863 | TCTCTCTCCCCCTGAGATTT | 57.839 | 488 | (TGC)4 |
| 212 | ACCGTCCTATCTCCATCTCC | 57.992 | ACTGACTCAACCGCACTCTC | 58.009 | 395 | (AAG)5 |
| 213 | TGTGCTGCTCATAGAACCTG | 57.571 | GGAAGGGAGGAGAGTGAGAG | 57.973 | 232 | (CT)7 |
| 214 | GGGCTCGAATCATAGAGTCA | 57.834 | CGAGCTCTTCATCTTCCTCA | 58.258 | 362 | (GAA)4 |
| 215 | CTCCGTCATAACACTCCGTC | 58.158 | CTCATATTCCCTCACAAGCG | 58.325 | 409 | (AAC)4 |
| 216 | GTCTTCTACGTTCTCCGGC | 57.465 | AAGACCAGCAAGACCACAAG | 57.93 | 319 | (TGC)4 |
| 217 | GGGGATTTGCAGTTGGAT | 58.274 | CGCCTTATCATGAGACCTTG | 58.325 | 411 | (AGA)4 |
| 218 | CTCTGCAACATCTAGGCAGC | 58.777 | CAGGAGCTACTCCACCAGAA | 58.03 | 198 | (TC)6 |
| 219 | CATCACCTTCTTCATCCCAC | 57.91 | CAAACCCTCCACTTAACCCT | 58.029 | 291 | (TCA)5 |
| 220 | GCTACCGTTTCGTACAACCA | 58.701 | GCTCATCAAACAGCTAGGT | 58.028 | 480 | (TCT)4 |
| 221 | GGTATGGAGCGTACTCCGTT | 59.08 | GGTGCAGCTGAACTCGTATT | 57.979 | 244 | (CCA)4 |
| 222 | AGTCGATCATGTCTTGCTGC | 58.99 | ACCTTCACTCACAAAGCTCG | 58.0871 | 188 | (CCA)5 |
| 223 | GTCACGGTTCAGGAAACATC | 57.97 | CTAAACCGCCACATCTCACT | 57.826 | 185 | (GAT)5 |
| 224 | CCTTCATTCAATCTAGCCTC | 57.668 | GTGATGGTTCCTATGATGCC | 57.803 | 424 | (ATC)4 |
| 225 | CTCAACAGGCTGCTTATGGT | 57.98 | CCAGGTACAAATCACGCAAG | 59.195 | 497 | (CAC)4- |
| | | | | | | (CTG)4 |
| 226 | TTGCCCTCTGGTGTTTAGTC | 57.797 | CTGAGAGAAGCAAGCACTCC | 57.9 | 326 | (AG)7 |
| 227 | TCAGGGTAAACCTTACTGCG | 57.907 | GCCTTGAGTCTTTGCTTCTG | 57.826 | 179 | (TGA)4 |
| 228 | GGATGTTGGCTGACTTTACG | 58.228 | TGGTGGTCTTACTTCTGCTG | 56.46 | 491 | (AGA)4 |
| 229 | GAACGGTGGATACAATCAGC | 58.019 | GACATATCGTCCTCATTCGG | 57.961 | 473 | (GGT)4 |
| 230 | CGAAGGTGATCGAGAAGAT | 58.387 | ATAGGTCGATCGTCCCTTTC | 58.067 | 264 | (GGT)4 |
| 231 | GGGAGATAGAGTTTAGGCGG | 57.903 | TATCTTCTCTTGCAGCAGCC | 58.353 | 247 | (TGG)4 |
| 232 | AGGGTTTCAGTTTCACCCAC | 58.891 | CAGAACCAGTACCCCATACG | 57.952 | 434 | (TTC)4 |
| 233 | CAAGCCATGAAGTCTCGTCT | 58.029 | CACTGGCCAATGTAAGTTCC | 58.076 | 394 | (AGA)4 |
| 234 | CAGCCACCAATACCTTTCC | 58.005 | TGTTTCTTAGGTACTGCCCG | 57.907 | 366 | (TCT)5 |
| 235 | TAGAACCACTTAACCACCGC | 57.757 | GCTACAAGACCATCACCACC | 57.999 | 459 | (TCT)4 |
| 236 | GGTGATGTTGAAGACCCATC | 57.746 | GTTGCTGCTGTTGTTGCTTC | 59.646 | 466 | (AAC)5 |
| 237 | CCAAGGATTGTTACCGTGAG | 58.077 | CAGGTGGAACTTGAGCATTG | 59.288 | 292 | (GAA)5 |
| 238 | AGCAGCCATGGTAGCAATAG | 58.026 | CCAGATTCACCATTAGCAGG | 58.173 | 294 | (GAA)4 |
| 239 | TGAACCTACTACCCCTGCAA | 58.228 | GACCAATGGTGAAGAAGGTG | 57.971 | 133 | (CAT)1 |
| 240 | TGTCGGCCTCTGTTTCTCT | 58.525 | GTAACAACGGCCACATAACC | 57.877 | 273 | (AC)6 |
| 241 | CACCTAGTCAACGCCTTTTC | 57.483 | CTTTGTTCCTTGTGCTCCAC | 58.342 | 435 | (AGT)4 |
| 242 | GCAGCCGTAAAGCAACCTA | 59.076 | CGTAGCCTTCGGTTCTATCA | 57.999 | 271 | (CAAT)4 |
| 243 | GAACCTCCCATTGGTCTCTC | 58.512 | TTCTTCCCCTGCTGTAACTG | 57.952 | 356 | (CAA)4 |
| 244 | CAGTTACAGCAGGGGAAGAA | 57.952 | GCACTCCATTCACCTTCA | 55.333 | 210 | (ATA)4 |
| 245 | CGGTTTCCGTAACCCTAGAT | 58.072 | GGATCCGGTTCATCATCTTC | 59.296 | 349 | (ATG)4 |
| 246 | GAACAACAACAGCAGCAAGG | 59.49 | GCTCTATTCGGCCTAGATCC | 57.992 | 325 | (AAG)4 |
| 247 | CGAGAAGAAGGCTGTAGCTG | 58.008 | CTCTGCTTCAAAGAACTCGC | 57.98 | 397 | (AAG)4 |
| 248 | CGTTATTCTCATCCACGTCC | 58.019 | CCTCCTTTTCATCGGGATAC | 58.452 | 404 | (GTT)4 |
| 249 | GGGTCAATTCTACCGGATTC | 58.308 | CATCCCCAATCATCTGTG | 55.492 | 297 | (ATG)4 |
| 250 | ATCCTCAACACCCACAACAC | 58.246 | GGCTTGTTGTAACAGCCACT | 57.883 | 341 | (ACA)4- |
| | | | | | | (AAC)4- |
| | | | | | | (AAC)5 |
| 251 | CCACAACCAGAAACCCTAAC | 57.022 | CGTAAACCACCACCTGTTTC | 57.98 | 436 | (ACAA |
| | | | | | | AC)4 |
| 252 | GATCTAATCCGCACTCATCG | 58.271 | CTTGAAGGCACAGGCTACAT | 57.98 | 325 | (GCT)5 |
| 253 | AACCCAACCCTAGATCCAAC | 57.826 | TCGTCTTCTTCGTCTTCGTC | 58.158 | 220 | (CAC)4 |
| 254 | ATCACCCCAACTCTCCTCTC | 58.101 | ATCAGAAGCAGAGGGACCTT | 57.925 | 306 | (ACC)4 |
| 255 | GTGGCAATGAGTAAGATGGG | 58.019 | CTCCCTGTAAACTGCCTTCA | 57.952 | 305 | (TGC)6 |
| 256 | CCCACTTTGACTCATTGACC | 57.971 | AACAAGACCACGGTTCACAC | 58.464 | 426 | (GCT)4 |
| 257 | AGAGACCGTGGGGAAAATAC | 57.974 | CATCAAACCCTTCCTACACG | 58.077 | 395 | (TCG)4 |
| 258 | ACTGGTCTTCGTTGCTGAAG | 58.087 | AAAGAAAGGGAGACAGGCAC | 58.377 | 416 | (TG)8 |
| 259 | AACCATAGATCCCTCATCCC | 57.71 | GCTGAGAAGACCAGCAGAAG | 57.9 | 245 | (CT)9 |
| 260 | GCTCAGCGGCTTACATAGAG | 57.905 | GTCAATGGCAACAAGTCACC | 58.987 | 114 | (GA)7 |
| 261 | ACACCTTCAAAGCCTCCTCT | 57.982 | ACATCCCTCAAACCCTCTTC | 58.021 | 498 | (CGG)4 |
| 262 | CCACCTGCCAAAGTGAATAG | 58.228 | AGCATCCTCTTCTCCCTTGT | 57.925 | 432 | (CTG)5 |
| 263 | AACTTGGTGGAGGAAGAACC | 58.078 | AGTAGCAGGAAAAGGGATGC | 58.411 | 141 | (GGT)4 |
| 264 | AATGACCAAGAGACCCCTTC | 58.021 | ATCAGCAGCTTCTCACCATC | 57.969 | 219 | (CTG)4 |
| 265 | ACCCTCTTCAACATCACCG | 58.496 | CATGCCAGTATAAAGGTGGG | 57.972 | 168 | (AG)9 |
| 266 | TGCTGCTCTGCTATGTATCG | 57.791 | CCGGTTAGACCAAAACACAC | 57.98 | 239 | (TA)6 |
| 267 | GAGTTCTGGTCCAACGTGTC | 58.112 | CATGGTACTGCTGATGGTCA | 58.05 | 218 | (CAG)4 |
| 268 | AACGAACAAGCACCACTACC | 57.729 | AACACACAGTCCACAACACG | 57.986 | 339 | (ATG)5 |
| 269 | GCAGGTTGTAGGGTTAGGGT | 58.055 | TAACAGGAGGAGCATGAAGC | 58.048 | 260 | (TGG)4 |
| 270 | GTGTTTCAACCTCTGATGGG | 57.971 | GACCCGTGTTTTACAAGTGG | 57.98 | 275 | (TAA)4 |
| 271 | AGTCTCCACCACCACTACCA | 57.979 | TCCTTCTGATCTTGTGGCTC | 57.94 | 201 | (TGA)4 |
| 272 | CAGGTTGTTACTCAGCGGTT | 57.884 | GTGGCAGTTCTGGAGAATCA | 58.802 | 270 | (TCC)5 |
| 273 | CTCCATTCAGTCCTCCACAC | 58.052 | CACCACCAAGAATTACGGAG | 58.077 | 374 | (GTT)4 |
| 274 | GGATGATGAGCTGGTAATGG | 57.961 | TTCCTCTGGAATGTCTGAGC | 57.94 | 124 | (TGA)4 |
| 275 | GGTAACTCCAAATCCTCCGT | 57.974 | GATCCACACTCAACCGAATC | 57.909 | 358 | (GAA)4 |
| 276 | GACATATCTCTACCCCTACA | 58.2 | CTCTCTCCGATTTCCTCTCC | 57.993 | 224 | (CT)6 |
| 277 | CACTTTATGGACAGCAGCCT | 57.98 | GGGACACGTAGACAGACCAC | 57.979 | 247 | (ACA)4 |
| 278 | CACTCCCAATTACTTCCCCT | 57.975 | TAATCACAAGACTCCGCCTC | 57.893 | 218 | (TAT)5 |
| 279 | AAACACTCCTCCGGTCAAC | 57.531 | TGGCGTAAGTAGAGGTGGAA | 58.379 | 236 | (TC)7 |
| 280 | CACAGGGGTGGAGTCAATAG | 58.001 | GAGGCTTGAACAAGTAACGG | 57.483 | 395 | (GCA)4 |
| 281 | TCTCCGTGTCATCAAGACG | 58.264 | TCTTATACTCATCCTGCGGC | 57.943 | 485 | (TGA)5- |
| | | | | | | (AAT)5 |
| 282 | CTCCCACAATCTCCTTCCTT | 58.173 | CGGTGTCAACTACGGTATCC | 57.951 | 343 | (ATC)4 |
| 283 | GGTTTGAAGACAGAGGGGAT | 58.021 | GGCCTAAAAGCGGAAGATAC | 57.974 | 320 | (TCA)5 |
| 284 | CAAGACGAATCCCGTAGAGA | 57.894 | GGGTATCGAATCCICTTCGT | 58.067 | 384 | (GAT)5 |
| 285 | GAAAAACCAGCAGCAGTAGC | 57.783 | TCAGCTGTTTCTCCCTTACG | 58.105 | 367 | (TCT)4 |
| 286 | CATGTGGGGTGGTTTACAAG | 58.746 | TATTCTGGAGCGATGTAGCC | 57.943 | 484 | (TGG)4 |
| 287 | GGTAAACGACCTGGTAAGCA | 57.757 | CACGCCAGGTAGAGAGACAT | 57.9 | 462 | (TC)6 |
| 288 | CGGTAACGGAAACAGTAACG | 58.227 | GAGTGCAGAAACCTTGGATG | 58.287 | 300 | (ATA)6 |
| 289 | CTTTCATCACAGCGCACAC | 58.965 | ACTTCGTGAAGGTGGTGTTG | 58.621 | 118 | (TCA)4 |
| 290 | CTCGTCTGAAACAACCAACC | 58.187 | TTATCGGTGGTAGCAGCAGT | 58.406 | 348 | (CCT)5 |
| 291 | TAGGTCGTTATCTCACCCCA | 58.02 | CAATCGCCTGAAGAGAAGAG | 57.768 | 237 | (TTA)5 |
| 292 | AGAGCAATCACAGTTGGAGC | 58.028 | CCATGGCTACCTTCCTCATA | 57.641 | 410 | (GGT)4 |
| 293 | CAATCGCACGAGAAACTAGC | 58.677 | GTCCATGCTCACCATCATCT | 58.456 | 477 | (CCA)4 |
| 294 | CTTTCTGTCATCCCCAGTTG | 58.13 | CCGTGATTAACCACATCCTC | 57.864 | 428 | (ATA)4 |
| 295 | AGCCAACACCCCCTATATTC | 57.875 | ACTCATCTAACACCACCGGA | 58 | 258 | (AG)9 |
| 296 | CACTTACAACATGCTACGCC | 56.907 | GTGATCAGGTTCAGTCCCAG | 58.052 | 328 | (GA)6 |
| 297 | TGTCCTCTTCAACGGAGTTC | 57.84 | CACTTAATGCGAGGCGTAGT | 58.081 | 472 | (AAC)5 |
| 298 | TTCACACGTGTCTTCAGCTC | 57.502 | AAACTCAGATACCGCGTGAG | 57.98 | 450 | (ACTT)4 |
| 299 | GTGGTCATGATCCCTTTGAC | 57.746 | GAACCCTTGCCCTTACACTT | 58.174 | 214 | (TGG)5 |
| 300 | CCCAGTTGAATTCTGCTCTC | 57.451 | CAGATGCAATGGTAAGTCCC | 58.019 | 295 | (TCT)4 |
| 301 | CACTTGCAGAACCTATGGCT | 57.98 | CACCAGCAGTCATAGAAGCA | 57.571 | 276 | (GCA)5 |
| 302 | AGCTCCAGCTTCACAACATC | 58.028 | ATCAGACTCCTCCTGAGCCT | 58.002 | 367 | (CAA)4 |
| 303 | TCTCTCCTCACCAACTCACC | 57.751 | GCCTTAAGCAGCTCACTCTG | 58.008 | 359 | (TCC)4 |
| 304 | GCTCTCTCTTCCCITCATCC | 57.992 | CGATAACCTTACTCTCGCCA | 57.999 | 277 | (TCA)5 |
| 305 | GCTCTCTCTTCCCTTCATCC | 57.992 | CGATAACCTTACTCTCGCCA | 57.999 | 277 | (ACA)4 |
| 306 | TACAAGACGAATCCCGTAGC | 57.849 | GCTACCTCCCTGGTGTTTTT | 58.174 | 358 | (GAT)5 |
| 307 | GTCCATCTTCTTCCTCACCA | 57.616 | GGACCAGTGGAGGTAGGAGT | 58.031 | 154 | (AAC)4 |
| 308 | GCAGGAGCMAGAAGCAA | 57.773 | TGGTGTAGGGTTCGATGAGT | 58 | 208 | (CAC)5- |
| | | | | | | (TCAG |
| | | | | | | AC)4 |
| 309 | TGACTGGGATGCTAAGAAGC | 58.048 | GACCGTACTTTCTCCAAGCA | 57.951 | 164 | (ACT)4 |
| 310 | ATCTCAACAGCGATAGGCTC | 57.104 | GCAGTTGATCCAGCATCTCT | 57.969 | 483 | (GTG)4 |
| 311 | TCACCTCACCACCTCTTCAT | 58.052 | ACTCTGCCACTTCTTTGCTG | 58.243 | 489 | (TC)7 |
| 312 | ACCTCCGTTATGCAGTCTTC | 56.855 | CTCACCTCTGCAAGAAATGC | 58.597 | 443 | (CTT)4 |
| 313 | GAGTTTTGATCCCCGGACT | 58.929 | TATTCTAGCCCGTCTTGTGG | 57.85 | 273 | (TGC)4 |
| 314 | GAGTCTGGTGTTGAAACTAG | 57.845 | GCGTAGGATGAAACACCATC | 58.019 | 240 | (TAA)5 |
| 315 | TGCTGTCGCTAGGGTTAGAG | 58.283 | TTAGACGATCTAACAGGCGG | 57.999 | 338 | (ATA)6 |
| 316 | GTCGCTAGGGCTTACAATCA | 57.999 | ACTTCTCAAGGCCTTCACCT | 57.982 | 369 | (ATC)4 |
| 317 | AAGTCGCTTGAAGGAGAGGT | 58.133 | CCTGGTGTGTTGAGAACCTT | 57.611 | 284 | (ATC)4 |
| 318 | ACCTCTTGAACTCCGACCTC | 58.314 | GTAGATGTTCGGTTGTCGCT | 57.824 | 455 | (TG)6 |
| 319 | AACGTAAGACCCTCCTCTCC | 57.309 | AAGATTCTCCACAGGTTCCC | 58.021 | 368 | (AAC)4 |
| 320 | ACCTTATTCGGAGCCTCAGT | 57.881 | TATCCGACACAAGCTTCTCC | 57.893 | 272 | (AAT)5 |
| 321 | CACTACCTCTCCCACTTCCA | 57.712 | CCAAGAGTCAAAGAGACCGA | 58.001 | 298 | (ACA)4 |
| 322 | AGGTTAGCTCTTAGGGCTCG | 57.867 | CCTTCACCGACTCCACATAC | 58 | 113 | (CAT)5 |
| 323 | TTTAGAGTCGTGGACCAAGG | 57.799 | GAGTGCTTGATAAGACCCGA | 57.893 | 259 | (TAA)4 |
| 324 | CCGTTTCTAATCACCTCCCT | 58.121 | GGATMGTGACCAGCTTCCA | 57.737 | 309 | (GAT)4 |
| 325 | AGGGTTCCAGTGGGACTTAC | 57.954 | CTTTTCACCCTGACCGTTCT | 59.183 | 417 | (TC)8- |
| | | | | | | (CAC)5 |
| 326 | TAACCTCACACTCACAGCGA | 57.977 | TTGCGATCTCAAGGGAGTAG | 53.048 | 474 | (TGA)4 |
| 327 | TAGGCGTTTTCCTCTGTGTC | 57.951 | CAAACCGACAAGGCTAGGTA | 57.907 | 389 | (ATG)4 |
| 328 | ACGCACCCATCAGTACAACT | 58.087 | GAICCAGAMCAGGGGAAGT | 58.021 | 142 | (ACA)6 |
| 329 | GAGTGAGAAAGCCGTGTCAT | 57.869 | GCTGCCAACTCTCTCTCAAG | 57.9 | 283 | (CTG)4 |
| 330 | CCCTACTCACATCAAAACGG | 58.077 | ATCCGCAGTCTCAGTAGACG | 58.058 | 498 | (AAC)4 |
| 331 | TGTCGCCTCTCATTCTAAGG | 58.048 | AAGACGATTTCCCTCTCACC | 58.173 | 247 | (TGA)5 |
| 332 | AAGTACAACTCCACAACCGC | 57.729 | TCAATGGTGACAGGTTCTCC | 58.482 | 491 | (TGA)4 |
| 333 | CCAATCGATGCTTCACCT | 57.066 | TCATTGGAGTCTGTCCACCT | 58.052 | 307 | (CAA)4 |
| 334 | ATTCTCTGGGAATGAGGGAC | 57.964 | GACTGCATATGTGGCATCAC | 57.467 | 321 | (CAA)4- |
| | | | | | | (CAG)4 |
| 335 | GAAGAAGCGAGGGTCATACA | 57.893 | CAAAGTGGGGTGCTTGTAAC | 58.132 | 435 | (TC)6 |
| 336 | AGAAGGTCGCTGAAGAGGAT | 58.077 | CACCCACAAAACACTACTGC | 56.66 | 305 | (GAG)4 |
| 337 | GAAACTGGAGGAAGAGGAGG | 57.898 | TAGCTTCTGCTGAGCCTTGT | 58.008 | 319 | (CCA)4 |
| 338 | AGCGGTGAGATGTGAAAGAC | 57.869 | TCATCTTCATCGAGCTAGGC | 58.145 | 352 | (CGG)4 |
| 339 | GCACTAGTCTTCCCTCACCA | 57.87 | AAGTCACTCAAATCCTCCCC | 58.021 | 334 | (CT)6- |
| | | | | | | (TTA)5 |
| 340 | CACTGCTCATCCTTCCAAGT | 57.87 | CAGGCATACCTTGAACAACC | 58.076 | 388 | (TTA)4 |
| 341 | GTTGTGAGGACGGTGGTG | 58.38 | GCCGTCATGTTTGTATCTCC | 58.019 | 103 | (GGT)4 |
| 342 | CATATACCCAACCCAACACC | 57.517 | GTTGGATGTAACCCAACCAC | 57.61 | 411 | (CCAT)4 |
| 343 | GGAAGGAGGGATTCAAGAAG | 57.77 | CGGTCCTCAAGTTCACTAGC | 57.544 | 425 | (TG)8 |
| 344 | GCCCCTTCTTCGATTTAGAG | 58.02 | AAGTGTAACGCCTCAGCAAC | 58.036 | 452 | (TCC)7 |
| 345 | CCCAATTTGTTTCACCCC | 58.588 | TCCTCAAGCTCTCATCATCC | 57.879 | 326 | (AAT)5 |
| 346 | GCCACACACTCAAATTCTCC | 58.129 | CCTMCCCCTAACCCAACTG | 58.434 | 413 | (TGT)4 |
| 347 | AACTGGGGGACGATCATAG | 57.374 | GATTGGGTGACCGTAACAAG | 57.923 | 291 | (ATT)5 |
| 348 | CGTACCCTGTCGTCTCAACT | 57.801 | GGCGTTTAACTGAGGAGTGA | 57.951 | 198 | (AG)7 |
| 349 | CTAACCCTAACCCCACTCGT | 58.056 | CTGACGTCATCATCACCGTA | 58.05 | 322 | (TCC)6 |
| 350 | CCGCATCTACTGTTGAGGTC | 58.315 | CAGTCGGGTAAATCTTGTGG | 58.077 | 365 | (CCA)5- |
| | | | | | | (CAC)4 |
| 351 | GTGTTACCGAAGCAGCATCT | 57.979 | AGAATGCACGTCCGAAGTAG | 57.98 | 382 | (GAA)5 |
| 352 | TCGGTAAAGGTACAGCAAGC | 58.054 | CAGTGGGAGGTGGTAATTTG | 57.924 | 284 | (CCA)4 |
| 353 | GGTGCAGAACCCACATGATA | 59.374 | GAGTGAGAACCGATAAGCCA | 57.893 | 340 | (AAC)4 |
| 354 | GTCGTAAGATGACGCACACA | 58.276 | CATCTAACTGAGCCCCCTCT | 58.35 | 379 | (TTA)4 |
| 355 | AGTGGAGAAATACTTGGGGG | 57.975 | GCTCTGCTTATCGTGATCGT | 58.075 | 307 | (TGA)4 |
| 356 | GTCCCTCGCTCCTTTCTTAC | 58.001 | ATTTAGGTTACCAGCGGGAG | 58.213 | 171 | (CT)7 |
| 357 | AACTGGGAGGTTCAGAGGTC | 58.159 | ACTCTGGTGCATTCAGTTCC | 57.708 | 361 | (CTG)4 |
| 358 | CCTCGGGAACATCACTAGAA | 57.739 | GGTTCCAAGAGGAAGGAGAG | 57.898 | 133 | (CTT)5 |
| 359 | CATACGAGGTTAAAGCGACG | 58.464 | GACCTCCTTCAGATCACCCT | 58.101 | 474 | (TTA)4- |
| | | | | | | (TTA)4- |
| | | | | | | (AC)7 |
| 360 | TTCACTTCTCAAGCTCCCAC | 58 | TAACTCTCTTCAACCGCCAC | 57.951 | 475 | (GGA)4 |
| 361 | CTCTGCAACTATTCCCTTCC | 56.476 | ATCTCAGCCGACACAACAGT | 58.304 | 456 | (TTG)4 |
| 362 | CCTACAAATCAACACAGCCC | 58.076 | TCCTCAAACACTTCCGACTC | 57.84 | 438 | (ACA)4 |
| 363 | ACTACAGAAACGATGGCACC | 57.669 | CATACGACTGGTTCACCCTC | 58 | 427 | (GCT)4 |
| 364 | GAGGGTGAACCAGTCGTATG | 58 | TCTTTCTTGTCCTGTGGGAG | 57.842 | 183 | (AGA)5 |
| 365 | AGAAGGTCGCTGAAGAGGAT | 58.077 | CACCCACAAAACACTACTGC | 56.66 | 305 | (GAG)4 |
| 366 | CACTCCTCCACCTCATCATC | 57.991 | GTCTGCACCTGCCTTACACT | 57.958 | 389 | (GCT)4 |
| 367 | TACACAACCACAACAGCCAC | 58.007 | TGCAGGAGGAGAAGTGATTC | 57.94 | 256 | (TCA)4- |
| | | | | | | (CAT)5 |
| 368 | GTGGCTCGATAGCAGAGTGT | 58.058 | CGCTGATAAGGGTTAGCTTG | 57.692 | 199 | (GAAA |
| | | | | | | TG)4 |
| 369 | CTTTCACCATCTTCCACCAC | 57.971 | CCTGATAGTATCCTTCCCCG | 58.477 | 201 | (AAT)4 |
| 370 | CACTGCTGGTGTTGCATTAG | 57.927 | TGAAAACACCTCCTACTCCG | 57.799 | 371 | (TTG)4 |
| 371 | AACAACCTCCACACCACAGT | 57.876 | ACTCATCGTACTTGACCCCA | 58 | 425 | (GGA)5 |
| 372 | AAGCCCTCAGTTCACTCCTT | 57.982 | TTCACCTCTGAGTTGGGTGT | 58.113 | 292 | (AAG)4 |
| 373 | AACCAGTTGATGATCTCCCC | 58.792 | GCCATATCCATAACAGACGC | 58.065 | 412 | (AAT)4 |
| 374 | AGCTTCACAACCCTCACAAG | 57.93 | CCCTTTCGACTTCCCTGTAT | 58.121 | 482 | (GAA)4 |
| 375 | AGGTTGCATGTGTGTGTCAG | 58.093 | AGTGGTGGTGAGATCCATTG | 58.349 | 290 | (TCATC |
| | | | | | | T)4 |
| 376 | TCTTCCGCCACAAGTTCTAC | 57.951 | GATCTGGGTACAAACAAGGG | 56.956 | 281 | (TTC)4 |
| 377 | ATTCACTACCGCCACATCTC | 57.607 | GTTGGTGACTTGTAAACCCG | 57.98 | 279 | (CAC)4 |
| 378 | TCGAGTTCGACTTACGTGGT | 58.37 | AAGGTGGTAACTGGTGGTGA | 57.901 | 472 | (CCA)4 |
| 379 | AGTCAGCACTTTGAACCGTC | 57.929 | TCTACACGACCGTCATCTCC | 58.671 | 197 | (CT)6 |
| 380 | TAGAGTCATGGACCAAGGGA | 58.071 | GAGTGCTTGATAAGACCCGA | 57.893 | 257 | (TAA)4 |
| 381 | GAATTCTCAGCCGTCTTCTG | 57.61 | GCACCATAACCGTAACCTTG | 58.027 | 168 | (GGT)4 |
| 382 | ACCATGTCTTCTTCTGCTGC | 58.028 | ACCTCTAAGCGTCGTGAGTG | 58.116 | 423 | (AC)6 |
| 383 | CTCCTTATCCTGGTGGGTTT | 57.975 | CTTGGAACAGAGGTTAAGCG | 57.637 | 260 | (ATA)4 |
| 384 | CGCTTAACCTCTGTTCCAAG | 57.637 | AGAACATCGTCCCACACCTA | 58 | 279 | (TCT)4 |
| 385 | CCTTCCCTTTAGATCCGTGT | 58.121 | GCTGGAAGTTCTTGCTGTGT | 58.087 | 192 | (ATT)6 |
| 386 | GATCTGAAGCTCCCAACTGA | 57.94 | ACCTTAAGATGCCCACACAG | 57.671 | 237 | (GCA)4 |
| 387 | GTGGACCTGCTTGAAGAGAA | 58 | ACCTCGTACCATCTCCTTCC | 58.049 | 380 | (TG)9 |
| 388 | CCTCCATAGGACACATCGAA | 58.515 | GCTTTCTTCTGGAGGTGTGA | 58 | 382 | (TTC)5- |
| | | | | | | (TCA)4 |
| 389 | TAGAAGGATGACGTCAGGGA | 58.23 | GGTGGGTGTTGGGTATGTAA | 58.048 | 380 | (GAG)4 |
| 390 | GGAGAGCTTGCTTGCACTTA | 58.406 | CAGCTCCATTAGCAGCAGG | 59.707 | 232 | (GTG)4 |
| 391 | CCAGACCAAACCAGATGAAC | 57.971 | CGAGGAAAGAGAAGAGGAGG | 58.201 | 247 | (GCT)4 |
| 392 | GCAATCCATTCGAGCAAG | 57.844 | AAGTCTGGTGGTTTCCCTTC | 58.078 | 427 | (GGT)4 |
| 393 | GCAGCGACGGTTTTAGTGT | 58.94 | ATGGAACCTACACCCTCCTC | 57.897 | 206 | (CACTC |
| | | | | | | C)4 |
| 394 | ACTCGTTCGAACTCGTTCAC | 57.929 | ACAAGAGCACGTCCAATAGC | 57.979 | 479 | (TGA)4 |
| 395 | GGGTATTGATAATCGGAGGG | 58.2 | GGAGGAATGGTGTGTGAAAG | 57.971 | 113 | (ATC)5 |
| 396 | TCCATTCCCCCTTTTCAC | 58.245 | CAGATCCTGAGCAGCAATTC | 53.544 | 340 | (AAT)4 |
| 397 | GATCCCTCAACAACGGAAG | 58.056 | TAACACTGGAGCCTAAACGC | 53.054 | 242 | (TA)6 |
| 398 | GCTCCACATCAGAACGTCA | 58.264 | GAGAACCAGAAAGCACCGTA | 57.951 | 419 | (ACA)4 |
| 399 | CTCCACAAACTTCCTGCAAC | 58.342 | CACGGAGTGAGTCCAGAGAT | 57.782 | 243 | (ACC)4- |
| | | | | | | (AAC)5 |
| 400 | TGGGCGAATGTTAGGAGTC | 58.657 | CCAGTGGACTTGTTTTGTGC | 59.187 | 329 | (CAT)5 |
| 401 | ACTCCTGCCTAAACCCTAGA | 55.649 | CGGAAAGACGACTAGATGGA | 57.894 | 268 | (AGC)4 |
| 402 | ATTCTGTTCTGGCGAGTGAG | 58.029 | GGATAGCAGGGACCAAATCT | 58.067 | 111 | (GAA)4 |
| 403 | GTCGTAAAGGTTGACGAGGA | 57.797 | CTGGACAAATCCCACAGTTC | 57.971 | 455 | (ATA)4- |
| | | | | | | (GTG)4 |
| 404 | TCAACCGGTAGCAGAAGAAG | 58.105 | ACCAAGGGATGAAGGAAGTC | 58.021 | 256 | (AGC)4 |
| 405 | CTTTGGCCTCAGTTCTTCTG | 57.673 | AAAACAGATGGACCTCCTCC | 58.021 | 483 | (CCA)6 |
| 406 | CCTCGTCTCATCTTCGATTC | 57.387 | GCATACTATCCGACCGCTTA | 57.898 | 468 | (ATCA)4 |
| 407 | CCACTCTTCCTCCATTGCTA | 57.894 | GCCTAAGACACCATCACCAC | 57.999 | 292 | (CCT)5 |
| 408 | CCAACACCTTCAATCTCGAC | 58.129 | CGTCATCTTCATCATCCTCC | 58.011 | 471 | (TTC)5 |
| 409 | ATTATCTCCGGCCAGGTATC | 57.965 | AGGGAAGTCGTCTCCTTGAT | 57.771 | 413 | (AAG)4 |
| 410 | GACCATGACCAAGACCAGAC | 57.886 | GATGTGAAAGTTGGAGACCG | 58.129 | 340 | (CCA)4 |
| 411 | GACAATGAAGCCTCTCCTCC | 58.818 | GTTATCACCGATCGCAGAAG | 58.326 | 301 | (TAA)6 |
| 412 | TACCCTCCTCAGACCCTACC | 58.05 | GGCATGTCCACCTATGAAAG | 58.019 | 289 | (TGA)4 |
| 413 | AAACCCTATCCTTCCACAGC | 58.121 | AAGGTTGGAGTAAGGGATGG | 57.975 | 100 | (CCA)4 |
| 414 | ACGGCTACACCATCATCATC | 58.389 | CTCGCCAGTAGAAGCAAAAC | 57.785 | 400 | (AGC)4 |
| 415 | CGATGCTCTGGATAAGCAGT | 58.076 | GTGATCCTGTTGATGCGACT | 58.673 | 142 | (GGT)4 |
| 416 | AACCTACCACCACACAAACC | 57.259 | CACCGTGTACTTCCCAAATC | 57.923 | 307 | (AC)7 |
| 417 | CGTGTCCTTTCCCTTAACCT | 58.174 | TCCTCACCATCATCCTCACT | 57.991 | 142 | (TGA)4 |
| 418 | CAATCCACCCTTCAGTTCAC | 57.971 | GTGTCAGTGTCTCCTCCAGC | 58.37 | 453 | (CCA)4 |
| 419 | GACGGACGTAGATTTTGCTG | 58.379 | CAAACCTGATCTCCTGCTCT | 57.032 | 470 | (AT)6 |
| 420 | ACCTACGACCATCCAGACAA | 58 | AGGATCAGCACTGGAAGATG | 57.809 | 443 | (ACA)5 |
| 421 | GTCGCTGAATCAATGGCTAC | 58.326 | AGGGGTTTAGGAAGGTGATG | 57.975 | 182 | (ACC)5 |
| 422 | ACGGCACCGTTTCACTTT | 59.139 | CAAACCCTGTGTTTCACTCC | 58.03 | 491 | (ATC)5- |
| | | | | | | (ATT)4 |
| 423 | AGGTAACGGTATGGTCCCAC | 58.646 | CACTGAAACCACCTCTCCAG | 58.274 | 160 | (GGT)6 |
| 424 | CCTTCAGGTGCCAAGAAAC | 58.272 | TCAGCTACGGTTGTCTCCTC | 58.029 | 452 | (AAG)4 |
| 425 | GGACGAAGAAACTATCCGGT | 58.121 | GATGACGGGTCAACAGTTTC | 57.97 | 264 | (AAT)5 |
| 426 | CCGTCTATGTGTCTGGGAAC | 58 | TCCAGTAGCCGTAAAGATCG | 57.999 | 133 | (CCG)4 |
| 427 | GGGTGGAGATCCTGAGAAGT | 58.101 | GCCTTTACACTTGGAGCAGA | 58.104 | 334 | (GGT)4 |
| 428 | GCTGATCGAGAGGAAGATCA | 58.041 | ATCACTTCAGCATAGGCAGC | 58.075 | 297 | (GCT)4 |
| 429 | CCCTAACCCTAACCCACAAT | 57.787 | AAGGTGTAGGCAAGTGCATC | 57.824 | 128 | (CCA)4 |
| 430 | CCGTAACAAACCACGGTTAC | 57.934 | ACTCCTCAGCTCATCACTCG | 58.112 | 211 | (CAG)5 |
| 431 | ACTCGATACCCAAATCCTCC | 57.918 | AGTTGGTACCGGAGTTGTGA | 58.059 | 410 | (CCA)4 |
| 432 | CTTCGTCACCCTACAACCTG | 58.215 | CTCTCTCTTGTCTCCCCCTC | 57.973 | 476 | (TC)7 |
| 433 | CACATCTCAAACATGGCG | 56.964 | GGGGTGCTATAAAAGACGGT | 58.072 | 374 | (ATC)6 |
| 434 | AGCAGACAGTTTGTGCCTCT | 57.67 | CTCCAGAAACAGAGCCTTCA | 58.158 | 390 | (GAA)4 |
| 435 | GGTTTCGATCTTCCTCCTTC | 57.768 | ACCTCCCAATTATCAGCCTC | 58.067 | 497 | (GAA)4 |
| 436 | GTTTCCTTCTCTACCGGCTC | 58.001 | CTTCGTACACATCCACGTCA | 58.112 | 212 | (TCC)4 |
| 437 | ACGTGGATGTGTACGAAGGT | 57.929 | CGCAAACCTAGACAACTCAG | 56.173 | 398 | (TCG)4 |
| 438 | CCCGTCATCACATCACACT | 57.773 | GACACCATAGATGACGAGGG | 57.94 | 288 | (ATA)4 |
| 439 | CTACTTCACCACCAACCACC | 57.901 | GGAGTTGATGCAGCTAATGG | 58.326 | 159 | (CCA)4 |
| 440 | TCCGGTTTCTTTGGAAGG | 58.614 | GAACAAACACCAACACCCTC | 57.87 | 395 | (AAC)4 |
| 441 | AAAGTGCCTGAGCACCAAC | 58.869 | TGCCTCTCGATTCCACTTC | 57.94 | 373 | (TAT)4 |
| 442 | GTCCCCAACGTATTCTCCTT | 57.974 | GCGAGGTAGAACGGGAGTAT | 58.293 | 146 | (AGGT |
| | | | | | | CA)4 |
| 443 | CCTGTAACGTGTGGTCATCA | 57.946 | CCCTTGACAAATTCTCCTCC | 58.568 | 398 | (ATG)5 |
| 444 | ACCACCACCGGAAAAGTTAC | 58.815 | TTAGTAAGGATCACGCGGAG | 57.999 | 126 | (AAC)5 |
| 445 | CAGAGTGCAAGATCAAAGGG | 58.442 | GCCCTCAGCATCACTTACTT | 57.013 | 265 | (ATG)5 |
| 446 | CTAACCCTAACCCCACTCGT | 58.056 | CTGACGTCATCATCACCGTA | 58.05 | 316 | (TCC)4 |
| 447 | CACAACAACCACCACAACC | 58.186 | ACTCCCATCTTCCAACTTCC | 58.021 | 295 | (ACC)4 |
| 448 | CTGGTTGTTGTTGGTTAGGG | 57.981 | CACAACCTTTCTTCACCAGC | 58.342 | 143 | (TGG)6 |
| 449 | GGAGTACAGAAAGCGAAGA | 59.135 | CTGACTCTTGAACCCAAGGA | 57.842 | 352 | (ACA)4 |
| 450 | GGGAGTAGTAGCAGCTTCCC | 58.028 | CACATCTTCCCCAACATACC | 57.708 | 342 | (GAT)4 |
| 451 | ACAAGATTCAACCCCCTCC | 58.777 | AGGTTCTTGCCTACAAAGGG | 58.318 | 411 | (ACC)4 |
| 452 | ACCCAATCTCCACCCTACTC | 57.897 | GATTCCGATGGAGTGAACAG | 58.071 | 278 | (ACC)4 |
| 453 | AAACACCTGAATCTCCTCCC | 58.021 | AGGAACAGAACCTCTCGGTC | 58.314 | 438 | (AAT)4 |
| 454 | CTACAGCTCACACACACATCG | 57.919 | CTCTTGGAGTTCTGATCGCT | 58.029 | 460 | (GA)6 |
| 455 | CTAAACCGCGATTGGTGT | 57.118 | AGAGGATGAACAGAGGGGTC | 58.101 | 152 | (TAA)6 |
| 456 | CTAAACCGCGATTGGTGT | 57.118 | TGACGCTCTGTTGTCTTC | 57.502 | 318 | (GAA)4- |
| | | | | | | (ACG)4 |
| 457 | CTCAATCACTCACTCCACCA | 57.09 | TTATCGACTCAAGGTCGAGG | 57.894 | 387 | (ACC)4 |
| 458 | CACCGCTTCCAGAAGAAAAC | 59.853 | CTCTGGTCCATGGCAACTAC | 58.158 | 340 | ATCA |
| | | | | | | AG)4 |
| 459 | CAAAGGTTGCAGAGGCTAAG | 57.786 | ATTCTATTGAGAGACCCGCC | 58.214 | 105 | (CAG)4 |
| 460 | GACAGGTATCCGAGCAACTG | 58.315 | CATAAGAGCTGCCCCTGTAA | 57.999 | 283 | (TCT)4 |
| 461 | GAGTAGCTCAGCTCGTTTGC | 58.007 | GGACATAAACCTGCACAAGG | 58.076 | 467 | (TG)6 |
| 462 | ATAGTGGACCGAGCTTTGTG | 57.826 | ATAGAACATCGCGTCCGTAG | 57.877 | 308 | (ATA)4 |
| 463 | AAAATGTCCCTCTCCACCAC | 58.842 | TTCTTTGTCCTCCAGCTGTC | 58 | 233 | (CAC)6 |
| 464 | GTGTGATGGTAACGGTGGTT | 58.187 | TGTGTGTACGAACCGTCAAC | 58.007 | 367 | (CCA)4- |
| | | | | | | (TGG)4 |
| 465 | ATCATCTGACGGTCCAGAAC | 57.48 | CCACCATGCTCCTTTGTATC | 58.019 | 414 | (AAT)5- |
| | | | | | | (AAG)5- |
| | | | | | | (CCG)4 |
| 466 | AGTCCTGGGTCGTGTAATGT | 58.087 | GGCAGTCCAGCAGTAGGATA | 57.922 | 135 | (GT)6 |
| 467 | TACCAGCCAGGAAGAAACAG | 57.952 | GATCATGTCTTTGTCGGAGG | 58.071 | 330 | (CCAA |
| | | | | | | CT)4- |
| | | | | | | (CAT)5 |
| 468 | CGAGGACTGTCTTGAGCTTC | 57.74 | CACGTGTCTTGATTCCTGAG | 57.81 | 156 | (AGGT |
| | | | | | | GG)4 |
| 469 | AGCTGACAACTACATGCTGG | 56.487 | GCGTGCCACATCCTTCTA | 58.292 | 204 | (AT)9 |
| 470 | TCGAGAGGATAATCTGCACC | 57.834 | CGATGGACCTCCAATAAGTG | 58.02 | 400 | (ATT)4 |
| 471 | TCGTGGCCTTCTTCATCTAC | 57.893 | CGTGGTAGTCATCAGGGTTC | 58 | 252 | (CGA)4 |
| 472 | CCAATTCGTGTCCTTACTCG | 58.228 | CTTTGTTTCACCTCCACCAC | 58.03 | 245 | (CAAT) |
| | | | | | | 4- |
| | | | | | | (GGC)4 |
| 473 | GGGTTTCGTCTGCTACTTGT | 56.923 | CCTGCATGTAAGGTAAGCGT | 57.933 | 485 | (CAT)5 |
| 474 | CTAATCCAACCAGCACACCT | 57.671 | AGTAACCGTTTCCTTGTCCC | 58.029 | 236 | (CCGC |
| | | | | | | AC)4 |
| 475 | CAGTAGCTGCTCCATCATCC | 58.416 | ACTCAGAACTCGTGTCGCTC | 58.172 | 219 | (AGA)4 |
| 476 | GACGGTATCCATGCTGTTCT | 57.607 | CCCACATAGGCTAAGGGTTT | 58.072 | 225 | (AAG)4 |
| 477 | TAATCTCCCTCCCCTACCAC | 57.919 | GAAGACCTTCCTTCGGTCTC | 57.897 | 236 | (CAA)4 |
| 478 | GACGTGGTGGAGAACATAGG | 58 | CTCAGAGATCTCAATCCCCA | 57.718 | 110 | (ACA)4 |
| 479 | CGCCAGACTCCGTAATGATA | 58.747 | GATGATCCCTGTTCGACTTG | 58.071 | 396 | (TG)7 |
| 480 | TGGGTATGGTTCAAGGTGTC | 58.258 | TGTCTGGTAAGGATTCCAGC | 57.737 | 478 | (CAC)4 |
| 481 | CAACAAAATGGACCCACG | 58.292 | CTCAATGCTAAACCCACCTG | 58.228 | 216 | (CCA)4 |
| 482 | TCTCTACAGCCGCTAGTCGT | 57.883 | TCGTCTTAAACTCGGTGAGG | 57.952 | 167 | (TC)7 |
| 483 | AGCAGTTCTGATGGAGCTTG | 58.187 | GACCAAGTGTTGTGAAAGGG | 58.03 | 348 | (GAT)5 |
| 484 | CAGTAGGCATCACAACATGG | 57.539 | ACCATCATCGCATCTCTCTC | 57.744 | 250 | (TGG)5 |
| 485 | CACTCCTCATCCAGTCATCC | 57.991 | GCAGTCCTATTGCGAGTGTT | 57.979 | 267 | (ACC)4 |
| 486 | ACCTCCTCAAGCTTCCACTT | 57.982 | AGAGGAGACTGAACCGGAGT | 57.903 | 283 | (TCAAC |
| | | | | | | C)5- |
| | | | | | | (AAC)5 |
| 487 | GCAGAAAGTCCACCAAAGAC | 57.353 | GACGAACTAGACGAAACCGA | 57.951 | 307 | (ATA)5 |
| 488 | GCAGAAAGTCCACCAAAGAC | 57.353 | GACGAACTAGACGAAACCGA | 57.951 | 307 | (ATC)4 |
| 489 | AAGCTATGTGTCAAGGCTGG | 57.98 | GCCTGCCTGCTACGTTAAT | 58.012 | 158 | (TTAT)4 |
| 490 | CACAGGGGTGGAGTCAATAG | 58.001 | GAGGCTTGAACAAGTAACGG | 57.483 | 395 | (GCA)4 |
| 491 | CAAACACTACGGACAGAGCA | 57.472 | CTCTCTGTCGCCGGTTATTA | 57.999 | 369 | (GAA)4 |
| 492 | ACTCTTCACATACTTCGCCG | 57.98 | ACATACTGCGTCGTGGTCTC | 58.755 | 162 | (CCT)4 |
| 493 | CCCAACCAAAGCCACTTTAC | 59.471 | CATCTGCGAGTGATGAGATG | 57.85 | 260 | (AT)6 |
| 494 | ATCTGCTCCGAATCTCAGTG | 57.97 | CCGTAGCACCTAAAGATGGA | 57.85 | 170 | (ATA)4 |
| 495 | GAACCCGTTGTATGTTGGTC | 57.766 | GAAGACGGATTGAGTGGAGA | 57.779 | 291 | (AAG)4 |
| 496 | AACCGTCACCGTCACTCTAA | 58.215 | ACGACGAGACGTTTGTTAGC | 58.036 | 278 | (ATA)5 |
| 497 | CACAGTTGTATGTTGCGACC | 57.602 | GTAGTGGATCGGGCATCTT | 57.531 | 178 | (ACC)4 |
| 498 | AGACAACCTCGATATGTCCG | 57.61 | GAGTGTTGTCCACCGAGATT | 57.869 | 129 | (CCG)4 |
| 499 | CTCTTCCTTTGATCCAACCC | 58.568 | CTTCAGCCACCACCAAATAC | 58.076 | 237 | (TTA)6 |
| 500 | ACGGAGAAGAGGGTAGCAGT | 58.01 | AACCCTTGTCTCGAACTCGT | 58.794 | 482 | (GAA)4 |
| 501 | CCAATAACTCGGACCCTTCT | 58.121 | AGACGCAGGTTGTGGTGTAT | 58.087 | 297 | (TA)6 |
| 502 | CTACACTTTTCCCCGGGTT | 58.895 | GATACTCCCCGTTAACACC | 57.393 | 196 | (ATT)5 |
| 503 | CGGGCAGTCTCAGTTATCTC | 57.482 | GCTTTGACATCTGGTTGGAG | 58.287 | 349 | (AGC)4 |
| 504 | CGTATGCAAGGTCTTTCGTC | 58.379 | TAGTCTTCATGCTCGAACCC | 57.893 | 434 | (CAG)4 |
| 505 | AGACAACGATCTGCACACCT | 58.304 | GGAGGGGAGAGAGAGATCAG | 57.914 | 144 | (CA)6 |
| 506 | GGATCACACCAAACAGATCC | 57.746 | TCGGTCCTCGCTGTTAATAC | 57.849 | 392 | (ACC)5 |
| 507 | ATAGCCCTTCCAGATTCACC | 58.067 | CCAACACCTTCTGCAACTCT | 57.93 | 473 | (AAC)4 |
| 508 | CGACGGTGAAACAGTAGCTT | 58.036 | ATCCCCATACCCGTACTCAT | 58.067 | 466 | (GAT)6 |
| 509 | CCACATGCCACTAGTTACCC | 57.951 | GGTCAGTGTGGTTTCCTTTG | 58.03 | 474 | (GAA)4 |
| 510 | CCACATGCCACTAGTTACCC | 57.951 | GGTCAGTGTGGTTTCCTTTG | 58.03 | 474 | (GAG)4 |
| 511 | CACAGGAGGAGCAAGACTGT | 58.01 | CTGCTAACCGGAGAAGACAA | 58.105 | 263 | (GTC)4 |
| 512 | ATTCCTCAGGTGGTGCTGTA | 58.158 | CCTGGAAACACAACCTCATC | 57.971 | 175 | (GGA)4 |
| 513 | GAAACATTAATGGGGCGG | 58.768 | GCTTTATTCTTCTCCCCAGC | 58.019 | 111 | (GGT)4 |
| 514 | GGATCTGATGTACGTCCCTG | 57.94 | TCCTTATCGCATGTAGCCTC | 57.943 | 463 | (ACT)6 |
| 515 | CCTCTGTTTCACCTTTGTGG | 58.187 | CCTCGTACCATCTCTTTCCA | 57.739 | 296 | (TG)9 |

The application's sequence listing, which the Patent Office published only in electronic form, follows.

SEQUENCE LISTING (4277 sequences)

SEQ ID NO: 1 - DNA, 161 bp, Parthenium argentatum
cgccacacataaataatcaaaccttatccgtcaccacttgagaaaaaccctatacagggcggcatgccgccactgtcgctrctgccctgtccggccgccatttgtttttgttttctgtttcgtctttcttgtttcctgttctaaaaagactaggtctaggt

SEQ ID NO: 2 - DNA, 161 bp, Parthenium argentatum
aaatcgcaatatacgaataccacataaacggaaagaattcgtttattagttcctttatttatttactattacgaaagtaasccatttatggtgttataatgacttaattatctaagatactaatacatgactataaatttaaaatctggctacggtttaat

SEQ ID NO: 3 - DNA, 161 bp, Parthenium argentatum
tgcagtaattttaggtaggaagtgcaaaatatgggtcggtaaaaaatcagccgggtcaaatgggtcatcaacaaaaccaayaaataacgataaaatgccaatattcattacatattaattaatagcattgacatgttcattaaaaattaaccaataacctt

SEQ ID NO: 4 - DNA, 161 bp, Parthenium argentatum
agaataagataattggttcttagagttttttttaggatgcaaccaatctgaactgttggatggcgcaacgaatcataatcwttgtttggaaccaaaatttgaagacaagttaaagggctagattttttttaaacatcactaattttaatgataaatataca

SEQ ID NO: 5 - DNA, 161 bp, Parthenium argentatum
tacgcatgtaccaggtaaagggttatgagagttgggccaaggcaccactccatgtgggcctaaggtactccaaaaatgatrggcttcactttagcgtaacaggacatgggtatcaagcatccgtgatgaaacgcaaggtgggcacaagcccacctattgca

SEQ ID NO: 6 - DNA, 161 bp, Parthenium argentatum
tcttctcttctattcaatatatgttctccgtcactaaaatttttatactgttaaaaatgatttttattgcccgggatggcrggatctcactggaagcaacctctctatcttcaaagatggatgtaaggcttgcctccatcccaccctcccagacccttact

SEQ ID NO: 7 - DNA, 161 bp, Parthenium argentatum
ttgcctccatcccaccctcccagacccttactttctgtgtgggatattactgggtacgcttgtttgtttgtttgtttactyctataatgtaggtatgttggcaataatatagaaccaacccaattataaaaagaaaaaaaaaagatcattcgtagtgctag

SEQ ID NO: 8 - DNA, 161 bp, Parthenium argentatum
ctatggttatccgtgaaaggtataattctggaacaccctatggttcgggttataatttttactcggtttgtaatcggatcwctgacgggaatttaaatcagatttaaattatgtacacaacggttccgctactcgattaatatgtaatattaataaacgta

SEQ ID NO: 9 - DNA, 91 bp, Parthenium argentatum
tgcaggtggcgcggctggaccatagtccaatgagcggcggcggcacggcggcaaagagtttggtttgttcttggatgatgacgcaagcaac

SEQ ID NO: 10 - DNA, 91 bp, Parthenium argentatum
tgcaggtgcacctattcccgcaccaggtaaattttatttgccgtacaaagttttactattgtacattaaataatttataaatctgaaataa

SEQ ID NO: 11 - DNA, 91 bp, Parthenium argentatum
tgcaggctgcagcatgtgtcattgtttaactattatattactttaaagtttttactttgcttatgttaagcttttgtttacttaaggttat

SEQ ID NO: 12 - DNA, 91 bp, Parthenium argentatum
tgcaggtaattaaaagaaaaagttagacaacagttagtttcatcacatttaagttcctttttcacccaaacaattcacagcaacaaaattt

SEQ ID NO: 13 - DNA, 91 bp, Parthenium argentatum
tgcaggattgattgtggctatggtcatggcggagagcggagacaagtgcaataggtgggcttgtgcccaccttgcgtttcatcacggatgc

SEQ ID NO: 14 - DNA, 91 bp, Parthenium argentatum
tgcaggtactctttttaaaggatgcagtaagaactagcactacgaatgatcttttttttttctttttataattgggttggttctatattat

SEQ ID NO: 15 - DNA, 91 bp, Parthenium argentatum; identical to SEQ ID NO: 14

SEQ ID NO: 16 - DNA, 91 bp, Parthenium argentatum
tgcaggtatcttggtaaccatgggaacaccgccaccacctactcggtaagggttggcgggttatggcctcaggtagttttaccgacgaaga

SEQ ID NO: 17 - DNA, 91 bp, Parthenium argentatum
tgcaggataatgaagagcggaagcaacacgacatatggaaggaattgcagatggatctcctgaaccagctctagctgtcagcaggtcagca

SEQ ID NO: 18 - DNA, 91 bp, Parthenium argentatum
tgcaggtttcactttgggatgttgaatctagcacttgtccctcattcacatcaacaagtagtgaggtcacgttgtggaagctgtggctaga

SEQ ID NO: 19 - DNA, 91 bp, Parthenium argentatum
tgcaggaccgaggccgacctcgatatctgtaaacagttctgcatccaaaaactcagccatgttctctctgaagcttttcatgtagtcactg

SEQ ID NO: 20 - DNA, 91 bp, Parthenium argentatum
tgcaggatacacaacttttactttgggatcttgcgatggatgaacttgtagtgccacttcgccgtccacctggtgggtcccccacgttcag

SEQ ID NO: 21 - DNA, 91 bp, Parthenium argentatum
tgcaggttcataaacaaaggtaaatctgcgtacatgtgtctagtctaataaaaataatggaatgccaatattataaacattagtagaatta

SEQ ID NO: 22 - DNA, 91 bp, Parthenium argentatum
tgcagggtttggcgttccaattaatagatgatgttctagattttactggcacatcatcatctcttggaaagggctcattatctgacattcg

SEQ ID NO: 23 - DNA, 91 bp, Parthenium argentatum
tgcaggtactcaacctgatgatgttcttggtttggcaaagaaaggcgttccaaaattgaatagaccatccattcgtggcgatcatttgttc

SEQ ID NO: 24 - DNA, 91 bp, Parthenium argentatum
tgcaggatacgatgcataaaactgatcacctctagaataaccagctctggtcctgcaagaattatataaagagcaaaagagaaatgatatt

SEQ ID NO: 25 - DNA, 91 bp, Parthenium argentatum; identical to SEQ ID NO: 24

SEQ ID NO: 26 - DNA, 91 bp, Parthenium argentatum
tgcaggtcctatctacgtttcttagctgtatctctaatttatgtacctgcaaatgtttttttttggaatccgtgattttcgatcatagtcc

SEQ ID NO: 27 - DNA, 91 bp, Parthenium argentatum
tgcaggcctggtttgttttgattcgcactagaaaatgacatgttttgacccgttacccaatacctgaagtcaacatcttgcaaattctaat

SEQ ID NO: 28 - DNA, 91 bp, Parthenium argentatum
tgcaggtagcttaacgagccgtagctttcaggaatacttccagttaacgaattgtaagacagatcaaggtagatcatgctgccattagctt

SEQ ID NO: 29 - DNA, 91 bp, Parthenium argentatum
tgcaggaatgtttataaaacaaggacttggttcatttgtatgttcctctttttccctatattatacccatgaatataaaccatttacatat

SEQ ID NO: 30 - DNA, 91 bp, Parthenium argentatum; identical to SEQ ID NO: 29

SEQ ID NO: 31 - DNA, 91 bp, Parthenium argentatum
tgcaggaagtaggtgtgagcagaacatggccggaaccatggcaaccgaaccgaacagtgagtaccacatagaccgacccatttgataatta

SEQ ID NO: 32 - DNA, 91 bp, Parthenium argentatum; identical to SEQ ID NO: 31

SEQ ID NO: 33 - DNA, 91 bp, Parthenium argentatum
tgcaggtcatatccactgaacatcaaaacaatctaagaaatcaaaaactacaatcttcataaaaaagaacaacattatctccattgatgtt

SEQ ID NO: 34 - DNA, 91 bp, Parthenium argentatum
tgcaggaaagagaaggccaaacgaggttgtgattggcgagccagtcgtagagaatagggaccagagacttccactgtgtgtaacgttcgtt

SEQ ID NO: 35 - DNA, 91 bp, Parthenium argentatum
tgcagggtcctcaaataattcagcaggatccacaacgttgccaaaattgtggagcttatgcaaatctctattgcaacatcttacttggatc

SEQ ID NO: 36 - DNA, 91 bp, Parthenium argentatum; identical to SEQ ID NO: 35

SEQ ID NO: 37 - DNA, 91 bp, Parthenium argentatum
tgcaggtacggttgtcgattccaagatatgtcatcccacagagtttgatttctacctgtgcagccatgctggcattcaagtatgtattcat

SEQ ID NO: 38 - DNA, 91 bp, Parthenium argentatum
tgcaggtggctttttactttgaccctttgattttagttctaaataatagtaatttcttgattatcttgattccaacaaaaaccttctaaat

SEQ ID NO: 39 - DNA, 91 bp, Parthenium argentatum
tgcaggaagtaggggcgagcagaacaaggtctgaaccgtaagaaccatggaaccgaaaagtgagtaccacagtgaccaacccgtttggtaa

SEQ ID NO: 40 - DNA, 91 bp, Parthenium argentatum
tgcaggatggaaaatagaagcattccaaagagctcctctagcaaccatcacagacgaggcgcctacaaaaaaatgttattgcacattcaaa

SEQ ID NO: 41 - DNA, 91 bp, Parthenium argentatum; identical to SEQ ID NO: 40

SEQ ID NO: 42 - DNA, 91 bp, Parthenium argentatum
tgcaggtaccttccgacgacatgtcgtcttcaatcggacaaaaccatgacgtaagtcaaaagtttctggccaggatctgcaaccccatttc

SEQ ID NO: 43 - DNA, 91 bp, Parthenium argentatum
tgcaggtcattgcatcatgggagaagagattgctggcttaaaacacatgtttaagatgatagatataggcaacattggttacattactttt

SEQ ID NO: 44 - DNA, 91 bp, Parthenium argentatum
tgcaggcaatatgacctcagaagtcttaacagtatttacatgtaaaatattaatgtttgcattatgtccacaaactcaattttcaacaggt

SEQ ID NO: 45 - DNA, 91 bp, Parthenium argentatum
tgcaggctgcaggttctagtgtatttatcctagaaaatctaggaattgctgttcaaaaagaaaaaaaaaatcagggtatgtactactagta

SEQ ID NO: 46 - DNA, 91 bp, Parthenium argentatum
tgcaggaatgagtctatatagggaagaatggaagattgtaaagtatcagtactcttgctttactaaaattgagtgattaaaaacaatatat

SEQ ID NO: 47 - DNA, 91 bp, Parthenium argentatum; identical to SEQ ID NO: 46

SEQ ID NO: 48 - DNA, 91 bp, Parthenium argentatum
tgcaggttaaagactcaatgagcatttggcatttgcttctagtattgtttagctgggatgatgtcatattcttgaatgtttacctatttta

SEQ ID NO: 49 - DNA, 91 bp, Parthenium argentatum; identical to SEQ ID NO: 48

SEQ ID NO: 50 - DNA, 91 bp, Parthenium argentatum
tgcaggtcgactaaagctgctcaagagcccaatcacagagaaccattaaaaactataaggtattccgtctctcagcttacttttagttgcc

SEQ ID NO: 51 - DNA, 91 bp, Parthenium argentatum; identical to SEQ ID NO: 50

SEQ ID NO: 52 - DNA, 91 bp, Parthenium argentatum
tgcaggttcctctgttagagcacatggcctaactatcgtatatggaatcccgctttccctaatcaaatcctccccctgttgacaaattgac

SEQ ID NO: 53 - DNA, 91 bp, Parthenium argentatum
tgcaggcgtttaccagtgcctatgtcatataaagccacatgttctgaatacccgctggccagaaacaattcatccactgagttgacatgga

SEQ ID NO: 54 - DNA, 91 bp, Parthenium argentatum
tgcagggtttgagaactggaaaatttggcgatctgcaaagcggcaattaggattttctttgaggaaagaattggaagataaatggaagcca

SEQ ID NO: 55 - DNA, 91 bp, Parthenium argentatum
tgcaggctcataaaattacgtaaacgccacgtggtactctagcgatgagttgccaaatgcgtatgtgtgtgtgtgtatgtgtatatatgta

SEQ ID NO: 56 - DNA, 91 bp, Parthenium argentatum; identical to SEQ ID NO: 55

SEQ ID NO: 57 - DNA, 91 bp, Parthenium argentatum
tgcaggaatattatccagcaaatagctgtcatgcttttagagtttctcatgttgatgtaaacaactacctgtcttgacccgtaaccaaacc

SEQ ID NO: 58 - DNA, 91 bp, Parthenium argentatum; identical to SEQ ID NO: 57

SEQ ID NO: 59 - DNA, 91 bp, Parthenium argentatum
tgcaggaagctatgctgatctaattcacagtctctccattggagtaatcaaatcagatagatagtgtgcatgtgtttagatatcagatttg

SEQ ID NO: 60 - DNA, 91 bp, Parthenium argentatum
tgcaggtaacaatttcgaacttattgatacatacctcatgatgttggagcgctctagtagttgtaaccctggtatgacttgtatacaaacg

SEQ ID NO: 61 - DNA, 91 bp, Parthenium argentatum
tgcagggtctatataggtaagattatgaatgctttacgtgatcccaggtttatcaagatctgtgtgtatgactaacgggcgggtggatgtt

SEQ ID NO: 62 - DNA, 91 bp, Parthenium argentatum
tgcaggcgacgcggcgtaggaccgaagtccaataagcggctgactgaagtcagcggcaataaaagcaaaaccgtagtccaagaggcagacc

SEQ ID NO: 63 - DNA, 91 bp, Parthenium argentatum
tgcaggtacaaaacatattctattaacaaattaatgatgcttgaaagtctgatccttctgaaaaaacaagatgtctcaattaaataaactc

SEQ ID NO: 64 - DNA, 91 bp, Parthenium argentatum
tgcaggatttgaactcccaaccttttggttgtggagtacatcacttaaccatcaggatgtccccttggggacagtagtacatacctatatc

SEQ ID NO: 65 - DNA, 91 bp, Parthenium argentatum; identical to SEQ ID NO: 64

SEQ ID NO: 66 - DNA, 91 bp, Parthenium argentatum
tgcagggcgagattcaatccaccattttcttcctgatcaaaatacaaaagctgcacaaagttgaagacttgggataaatacaggacattat

SEQ ID NO: 67 - DNA, 91 bp, Parthenium argentatum; identical to SEQ ID NO: 66

SEQ ID NO: 68 - DNA, 91 bp, Parthenium argentatum
tgcaggcttgtgatagcgaagaggacggtttatttggttttgacttgcacagtgatggtgacggcaacaggtgataattatttcttgaaaa

SEQ ID NO: 69 - DNA, 91 bp, Parthenium argentatum
tgcagggacgcttgtacttattgcattaaatgtaatacatatgacgattattaacccatttctttctctcttcaagttcggtataatgaac

SEQ ID NO: 70 - DNA, 91 bp, Parthenium argentatum
tgcaggctgcaacatattatgataaagatttatgcgtacatatattacatatgcatacgtatgtctggatatatagaaagaataatcctcg

SEQ ID NO: 71 - DNA, 91 bp, Parthenium argentatum
tgcaggtttgaccatcttttgctcgaatttcttaatattcgtttattattattatgaacttttgttgtgaatacactagttacttaaatta

SEQ ID NO: 72 - DNA, 91 bp, Parthenium argentatum
tgcagggtatgtatgtaataattggaccaattgggctagagcccttagttaacaaaagaacaatattgattaatgtaggagtttggttgat

SEQ ID NO: 73 - DNA, 91 bp, Parthenium argentatum
tgcaggagctaaaaggagaggtcaacacttaccagttatagtaggtaagctcccccaggacagctccttaggcgggaactcttttcctata

SEQ ID NO: 74 - DNA, 91 bp, Parthenium argentatum
tgcaggcatacctgaaacatagcttcttcaacgtccaaacacattgtttcaaagtttaggtatgcattaccaacccatgcaatacctttaa

SEQ ID NO: 75 - DNA, 91 bp, Parthenium argentatum
tgcaggcaatgaaaaaatgaatgtttgctttagcatagatgccaatggtattcttgatgtatcggctaagttggtatctactggtaatgaa

SEQ ID NO: 76 - DNA, 91 bp, Parthenium argentatum
tgcaggtaattcaatcatgggtttagtttaaaaattaggactggcaaaaccggttcaattatgttaaacgggtagagacgatgctattaac

SEQ ID NO: 77 - DNA, 91 bp, Parthenium argentatum
tgcagggttaggcttcatcaatggaattgcagctttgatcatattcttggccccggtataattgatggctataactttttcagcaaattca

SEQ ID NO: 78 - DNA, 91 bp, Parthenium argentatum
tgcaggatacgatgcataaaactgatcacctctagaataaccagctctagtcctgcaagaattatataaagagcaaaagagaaatgatatt

SEQ ID NO: 79 - DNA, 91 bp, Parthenium argentatum
tgcaggtggaatggtggcttcagatataatctgcatgatcgtatccacactctgcatcggttgatcaggctcttcaaactggttcatcatc

SEQ ID NO: 80 - DNA, 91 bp, Parthenium argentatum
tgcaggagagttttgacaagattaataggcagctagagaaggtgacgagggtgacggaatctgatagggcgccaaataattatgttaaggc

SEQ ID NO: 81 - DNA, 91 bp, Parthenium argentatum
tgcaggcagtggataacacaaccggattttcaaattttatgtaattttttcccttccaaaatctcatttaccaagactcaaaactttgtta

SEQ ID NO: 82 - DNA, 91 bp, Parthenium argentatum
tgcaggatacatgcagtggttgtaaaaatggcttctaaaagtttacaaacaaatgctcgcacattctacaattaatcatgctattgtttga

SEQ ID NO: 83 - DNA, 91 bp, Parthenium argentatum
tgcaggagcctatcaaagcacaggtgctcctcatcagcctatttcatcatttcagaatgcagggtcttatgctggtcccgccagttataca

SEQ ID NO: 84 - DNA, 91 bp, Parthenium argentatum
tgcaggactaagaattttgtttattccatcaacaagaccatgattatcctttggagcttttgctgtcttcttggacttctgcccatttatt

SEQ ID NO: 85 - DNA, 91 bp, Parthenium argentatum; identical to SEQ ID NO: 84

SEQ ID NO: 86 - DNA, 91 bp, Parthenium argentatum
tgcaggtgtggattttaaggtgaaatatgtcaccattgatgggaagaagttgaagcttgctatttgggatactggtaactgtctttattgc

SEQ ID NO: 87 - DNA, 91 bp, Parthenium argentatum
tgcaggatttgaatccatagctagaggtcttacaaatgcaaaacttagagtcgacttccgtcatcgtcttctatctttatgctcagatgtg

SEQ ID NO: 88 - DNA, 91 bp, Parthenium argentatum
tgcaggtggcttgggtttatttgaggtgggtttcatcaaaaaaacaagcaaatcccaccagtgttgcagtggttggcaaatgggtgtgtaa

SEQ ID NO: 89 - DNA, 91 bp, Parthenium argentatum; identical to SEQ ID NO: 88

SEQ ID NO: 90 - DNA, 91 bp, Parthenium argentatum
tgcaggaaatcatcaaacgtagatgataggcattcaattcaaggtacatagagggataaataagtaattttaatttctattgcagctgcta

SEQ ID NO: 91 - DNA, 91 bp, Parthenium argentatum
tgcaggcggtcatagagatgaagagctgaacccgcagcacattgatcaagtggcggttcacactcactcgactcatggacatgctcatgga

SEQ ID NO: 92 - DNA, 91 bp, Parthenium argentatum
tgcagggtgtgctgcatgatttcttctcccgtttgggtattatatattgatcttctttgtattaaggggcactatcataattcgctattaa

SEQ ID NO: 93 - DNA, 91 bp, Parthenium argentatum
tgcaggaaagacagcctcaccaaagttagacttttgccattttttttaacttcatagtttatagcttacaagtctttaccggttcaagagt

SEQ ID NO: 94 - DNA, 91 bp, Parthenium argentatum
tgcaggctcatttgaacacatagattatggtgcaaaataaaacgggtcaaaagtagccaaacctatccttagccatgtttcctaatgttgc

SEQ ID NO: 95 - DNA, 91 bp, Parthenium argentatum
tgcaggtgaaatcatacatgtatatgcaaggattccaaatccctgtcttaacttgacaattaaggagccactgcgtgaggattctaatttg

SEQ ID NO: 96 - DNA, 91 bp, Parthenium argentatum
tgcaggtctcttaccatcagaactaacaaaccgtacaaaatcaaatttgagagcataaggcaactctccaacgaccgtgttaaaaacatcg

SEQ ID NO: 97 - DNA, 91 bp, Parthenium argentatum
tgcaggcgccttgggctgaaagaaagcattcaagtaaaactttagcaacttaacgactaataagtagtaaaattatgacaagtagcaagaa

SEQ ID NO: 98 - DNA, 91 bp, Parthenium argentatum
tgcaggtaataaaaaaatcatttaacttactttatacacacaaacataacaatagcaatgttgcttcacctcattttactttcagttatac

SEQ ID NO: 99 - DNA, 91 bp, Parthenium argentatum; identical to SEQ ID NO: 98

SEQ ID NO: 100 - DNA, 91 bp, Parthenium argentatum
tgcagggaattaaacaacaaattaaaaaaaacaaaaaacaaatagaacaaagcttattaatttattgacaacagtaacaattgattttatg

SEQ ID NO: 101 - DNA, 91 bp, Parthenium argentatum
tgcagggttaggcttcatcaatggaattgcagctttgatcatattcttggctccggtataattgatggctataactttttcagcaaattca

SEQ ID NO: 102 - DNA, 91 bp, Parthenium argentatum
tgcaggatgcacctataaaaccgaaattcatacactaacaagattaaacataccaaaagcattggcagatcttagttgggccagttttttt

SEQ ID NO: 103 - DNA, 91 bp, Parthenium argentatum
tgcaggaggactaaccatgttagaacctaagtcatgttattccataaaggcttgtaaataattaaatgcaaatttatacaccaatttcatt

SEQ ID NO: 104 - DNA, 91 bp, Parthenium argentatum; identical to SEQ ID NO: 103

SEQ ID NO: 105 - DNA, 91 bp, Parthenium argentatum
tgcaggttgaccatatgcttgagtttgactaggttgctgttgagggtatgcttgattcagctgctgctgatagctgccatagtaacttgaa

SEQ ID NO: 106 - DNA, 91 bp, Parthenium argentatum
tgcaggaatgaaatgtgatgacttgcttctttttgcccataaaacaagcaagtctagtatgatagtgttctgaaataaaagaaagaataaa

SEQ ID NO: 107 - DNA, 91 bp, Parthenium argentatum; identical to SEQ ID NO: 106

SEQ ID NO: 108 - DNA, 91 bp, Parthenium argentatum
tgcaggagcgtaagctgagcgccttgatcgggattgttgctgaggtgttggctgaataatgaaaaaatgttcataagtatttcatgtgtag

SEQ ID NO: 109 - DNA, 91 bp, Parthenium argentatum
tgcaggaagatatatctcttggatatttgaggtaagttttttatccagttgtataaacatatgatgctctatatttgaacgagatttagtt

SEQ ID NO: 110 - DNA, 91 bp, Parthenium argentatum
tgcaggcttacacaattacagcatagtaacaatgaactactgatcgaatctaaaacatgaaacttgtagtacaatatatctggattaaaaa

SEQ ID NO: 111 - DNA, 91 bp, Parthenium argentatum
tgcaggtgcaacacattagacaaatcacaacgtatttatcttcacataggaaggaaaacaaatagcaatcttgcttgccggaacaaatcca

SEQ ID NO: 112 - DNA, 91 bp, Parthenium argentatum
tgcaggtgatggtctttttactattgaaatggaaaaaaaacattacgaaaagaaaacattgcataagatgattgatcctgatctaagaaat

SEQ ID NO: 113 - DNA, 91 bp, Parthenium argentatum; identical to SEQ ID NO: 112

SEQ ID NO: 114 - DNA, 91 bp, Parthenium argentatum
tgcaggtaccacacttgccttttgaagtcctacaaccgtgattatgtttgtagttggaaggacaaaatgcagtgaatatggctttcgtaaa

SEQ ID NO: 115 - DNA, 91 bp, Parthenium argentatum
tgcaggaaaatttaaaactaccagatttaaacatttatttacaaatcatcaattatcaacaaaattcctaatttaaaggggtgaaaacttc

SEQ ID NO: 116 - DNA, 91 bp, Parthenium argentatum; identical to SEQ ID NO: 115

SEQ ID NO: 117 - DNA, 91 bp, Parthenium argentatum; identical to SEQ ID NO: 115

SEQ ID NO: 118 - DNA, 91 bp, Parthenium argentatum
tgcagggtagattgcttcttaatacaactaatattaaacaaaaacttgtaaatatattattattaacaaaactagaagaacctactttcac

SEQ ID NO: 119 - DNA, 91 bp, Parthenium argentatum
tgcaggcttcgaggaatgtcaacagccattgtacccgcagtgaagaacctgcaactgatcggagaaataaaggaaaagacaccggaagaac

SEQ ID NO: 120 - DNA, 91 bp, Parthenium argentatum
tgcaggctactatgaaccattcacgcagaaaatcaatgccacataagcgacaagggagagatgaagagtttgacttcttgatgccatcaac

SEQ ID NO: 121 - DNA, 91 bp, Parthenium argentatum
tgcaggaaatgttgaatgtgccacctgtgtatatcgttggagctttcattccagcaaccatgattgcagtgctttactattttgatcatag

SEQ ID NO: 122 - DNA, 91 bp, Parthenium argentatum
tgcaggaatgtttttcctttgataggcaaggggtgtttttttttttacttcattccatcatgggatgaaagatacagtataacccgttctc

SEQ ID NO: 123 - DNA, 91 bp, Parthenium argentatum
tgcaggacttattttgtatagcaacagatcaaccttttcggttcccttcctccttcgcttttctaattagagcattttccactcttgaagg

SEQ ID NO: 124 - DNA, 91 bp, Parthenium argentatum
tgcaggtcgggcaaggggttagatggccaatcaatgcaggttattttaatatgaccgaaacactttttgtccaaaacatttcgtttttctt

SEQ ID NO: 125 - DNA, 91 bp, Parthenium argentatum
tgcaggggtttacagaacaagtgcaggtgctccccagcttgttagagttccatccgggtatcaaaaccagcctcaacatgtcaagtactcc

SEQ ID NO: 126 - DNA, 91 bp, Parthenium argentatum
tgcaggtgttcagcgtaaaaacttatatggttaccgttgctaattgctttaccaacagattagtccttataaagtagtagaggagaagggt

SEQ ID NO: 127 - DNA, 91 bp, Parthenium argentatum
tgcaggtactcaacctgatgatgttcttgttttggcaaagaaaggcgttccaaaattgaatagaccatccattcgtggcgatcatttgttc

SEQ ID NO: 128 - DNA, 91 bp, Parthenium argentatum
tgcaggtactgttagtcacccatataccggattagtaattagtatacaaaattagcctattttaatcattcttcacatcagcaagatgtta

SEQ ID NO: 129 - DNA, 91 bp, Parthenium argentatum
tgcaggtaaaccgaaaagcatccggatatcaggcatacctgcattaatcctcggatcctcgcccgcacatgagattctcgctacgggtaac

SEQ ID NO: 130 - DNA, 91 bp, Parthenium argentatum
tgcaggtttaggtgaatcagggaatcatgttttctagttttgtacctttaagaggcatgaaatcaaaaattgttccttactatatgaacgg

SEQ ID NO: 131 - DNA, 91 bp, Parthenium argentatum
tgcaggcccttgcttcagctctgccacagtatctggctgaccccaaaagattggtttcagtcaacttcaacatggatttgctgaatgattc

SEQ ID NO: 132 - DNA, 91 bp, Parthenium argentatum
tgcaggtcgttcaactgtgaaaagtcttgaaccatcttctgaagagaatgtaatgttgccgccttctgaactgccatcagccgctgctttc

SEQ ID NO: 133 - DNA, 91 bp, Parthenium argentatum
tgcaggacacaccaccggggcagggtgaaggacagccgcacctctcatcacatataacaccgcttcctctcatgtccgccatccttaatga

SEQ ID NO: 134 - DNA, 91 bp, Parthenium argentatum
tgcaggaaccattttctatggatttgtagaaatttgtcttagatttgggtttttataggaaattcttcgcaattatattggaatttgcaca

SEQ ID NO: 135 - DNA, 91 bp, Parthenium argentatum
tgcaggatcttgagaaagagaggaaagagaaagcccaaatcgtgtatgaacgaaagaaacagcttaacaaactacgagccaaagctgagaa

SEQ ID NO: 136 - DNA, 91 bp, Parthenium argentatum
tgcaggcgcttcgtggcaaagaagatgtatcgggttcgtttctacaactctttctatttgttatcccttcaccgcttaggggtgctacatg

SEQ ID NO: 137 - DNA, 91 bp, Parthenium argentatum
tgcaggtggtgcaactaatgataggcagacgaatgcggcttgtggttctagcagcagcagaggttctgctgctcgcggctcagactcactg

SEQ ID NO: 138 - DNA, 91 bp, Parthenium argentatum
tgcaggttacttcaggaatgagccctggttttaatctttatggatgcaccttaataggtatgttaaagaatagttaaaaacaaaatacaga

SEQ ID NO: 139 - DNA, 91 bp, Parthenium argentatum; identical to SEQ ID NO: 138

SEQ ID NO: 140 - DNA, 91 bp, Parthenium argentatum; identical to SEQ ID NO: 138

SEQ ID NO: 141 - DNA, 91 bp, Parthenium argentatum
tgcaggaggcgctgagaatgaagtgtttggatgttgggtctcgggcaaatgacaccggaaaagggccaggtgaccggaaatttataatgcc

SEQ ID NO: 142 - DNA, 91 bp, Parthenium argentatum
tgcaggaaccagttcagggtcctacccgatagtaggaagaaccgcgcgtttgtagatcatcctttgatcaatgtaaagaatatcttcttgt

SEQ ID NO: 143 - DNA, 91 bp, Parthenium argentatum; identical to SEQ ID NO: 142

SEQ ID NO: 144 - DNA, 91 bp, Parthenium argentatum
tgcaggggacttaatgttgacatctcggatcagaaatactgattcaaagccatttctgtttacgtttgcatatcacacctatttttctgtt

SEQ ID NO: 145 - DNA, 91 bp, Parthenium argentatum; identical to SEQ ID NO: 144

SEQ ID NO: 146 - DNA, 91 bp, Parthenium argentatum; identical to SEQ ID NO: 144

SEQ ID NO: 147 - DNA, 91 bp, Parthenium argentatum; identical to SEQ ID NO: 144

SEQ ID NO: 148 - DNA, 91 bp, Parthenium argentatum
tgcaggtatttctttcgatgtttcctgcatcctaaccctctgccaatctgcaaatttgctttcttgtctcagaagtgtccatcttcctttc

SEQ ID NO: 149 - DNA, 91 bp, Parthenium argentatum
tgcaggttaaaaattaagcatccggttaccaaaaaaatatcgataaaaacataggtttcagtgtcttatcattatagcctacaaattgtag

SEQ ID NO: 150 - DNA, 91 bp, Parthenium argentatum
tgcaggtggtacagagtacaaggaacagtatgtacctagaagatcctacaaccaaagaggcaatggccgtagcagcggtggtggtggtcgt

SEQ ID NO: 151 - DNA, 91 bp, Parthenium argentatum
tgcaggatccgaaagctttattaaatcaaatttagtttgacttttcattattcccaaagaaagtcaggctagtgttttcacgttaaaccga

SEQ ID NO: 152 - DNA, 91 bp, Parthenium argentatum
tgcaggaagcaaaaatggagatagtaacaacaaaacatatccatgaaattaaaatgatagtttaatcattcttttattatgagtaataata

SEQ ID NO: 153 - DNA, 91 bp, Parthenium argentatum; identical to SEQ ID NO: 152

SEQ ID NO: 154 - DNA, 91 bp, Parthenium argentatum
tgcaggaccgctgccgacgacacaaacgcgcaacgttcggacggttgcagacgaaaacgttcgagcaaacattgctctgaatatagccatt

SEQ ID NO: 155 - DNA, 91 bp, Parthenium argentatum
tgcaggggtcaaacttccaaaaaaggttggtagtatgccttacaaaatatacaaaagctgtgttgatctggcgttgactttgtgttgactt

SEQ ID NO: 156 - DNA, 91 bp, Parthenium argentatum
tgcaggcccgcggatcacaaccacacgaacatcatcagaacctatgttcaacaatgaaatgacttcatgcacccgagattctatcccaaca

SEQ ID NO: 157 - DNA, 91 bp, Parthenium argentatum
tgcaggtatatattctgtataaaaagtcaacactttgaattttggctttttaagttttgttgacccagttcactatgttttactggttttc

SEQ ID NO: 158 - DNA, 91 bp, Parthenium argentatum
tgcaggtttccgacaaaaaagcaaggcagattctccgacaaaattccgactagtttctagctacattttttagtgctagttttattccgta

SEQ ID NO: 159 - DNA, 91 bp, Parthenium argentatum
tgcaggatcactttcactacatcaatcacaccattgttttgtaggtagtaggagcaatgccgaatacaggcaaaccaaactccaccaatgc

SEQ ID NO: 160 - DNA, 91 bp, Parthenium argentatum
tgcaggttcaaagtctttgtgatacattgctcttaccggaacaagaaattgatcggcgacctgcttttaattgatatagtatagttgtgat

SEQ ID NO: 161 - DNA, 91 bp, Parthenium argentatum; identical to SEQ ID NO: 160

SEQ ID NO: 162 - DNA, 91 bp, Parthenium argentatum
tgcaggtttcatgacataacagaatttgatgatgccaaaaggagttgtcgtatgcgcttggctggccataatgaacgcaggcgtaaaagct

SEQ ID NO: 163 - DNA, 91 bp, Parthenium argentatum
tgcaggatacaatgaaccattccaatttgaacctgcacttgtaagattcacagaattatcaatagtagaacttattggacccagaccgtga

SEQ ID NO: 164 - DNA, 91 bp, Parthenium argentatum; identical to SEQ ID NO: 163

SEQ ID NO: 165 - DNA, 91 bp, Parthenium argentatum; identical to SEQ ID NO: 163

SEQ ID NO: 166 - DNA, 91 bp, Parthenium argentatum; identical to SEQ ID NO: 163

SEQ ID NO: 167 - DNA, 91 bp, Parthenium argentatum
tgcaggttcttgctctgaaagtgaggttctctctgcaaagatatgatatagtaagttagacaataacattacggtaactttgataagcatc

SEQ ID NO: 168 - DNA, 91 bp, Parthenium argentatum; identical to SEQ ID NO: 167

SEQ ID NO: 169 - DNA, 91 bp, Parthenium argentatum; identical to SEQ ID NO: 167

SEQ ID NO: 170 - DNA, 91 bp, Parthenium argentatum
tgcaggcaagagccggtctagattatgagtcttcatatggaaaggaacgacccaatgatactattttgaaactgcaaaggacaacaccgta

SEQ ID NO: 171 - DNA, 91 bp, Parthenium argentatum; identical to SEQ ID NO: 170

SEQ ID NO: 172 - DNA, 91 bp, Parthenium argentatum
tgcaggctgggctacttagtgcatatgtcataaaaagactatattttggaaggtatatggattaggttatggagggtaacaaaaaacaaaa

SEQ ID NO: 173 - DNA, 91 bp, Parthenium argentatum
tgcagggagtgagcttttgactgataccactaaggtgagatgcagcaaaaggattaaattattaattgtttgtcaagtcaaattatgcata

SEQ ID NO: 174 - DNA, 91 bp, Parthenium argentatum
tgcaggtaatgcaaaatctgtaaggagatgctcatctaattattgtgctttcaaattgtgtataatcaacttctttaggatacagtgatta

SEQ ID NO: 175 - DNA, 91 bp, Parthenium argentatum; identical to SEQ ID NO: 174

SEQ ID NO: 176 - DNA, 91 bp, Parthenium argentatum
tgcagggagtatattaatcacaaggaaatgttaggaaaaaaaaacagtttcaacatttcaatgtattaaatatgatcccgaaacaacaata

SEQ ID NO: 177 - DNA, 91 bp, Parthenium argentatum
tgcaggccaggtttggcttttcaacaacttgcatttttcatttagaggtggcaatgtataactaattacttatgaatgggtcgatttgggt

SEQ ID NO: 178 - DNA, 91 bp, Parthenium argentatum
tgcaggtgtttatgagcttataccttattataaggatgagaatacagttttttgatgtttcccctccctctgtcactgtgaatgttcagca

SEQ ID NO: 179 - DNA, 91 bp, Parthenium argentatum
tgcaggcttcctaaactcaaaggtgacaattggtggcgaggtcatgcaagagcttttctgaaatatgtaaatttgcctgccgatgcgcttc

SEQ ID NO: 180 - DNA, 91 bp, Parthenium argentatum
tgcaggctgcatgagcaggttatcgtaatttaatctattaaatgaagaaggtggatttgtaatatcttattttatgttggaagaagcaatc

SEQ ID NO: 181 - DNA, 91 bp, Parthenium argentatum
tgcaggtctgtgaccaatgccctaacgtaaaatatgaaagggaagggaactttatcactgtggatattgagaaaggaatgcaagatggaca

SEQ ID NO: 182 - DNA, 91 bp, Parthenium argentatum
tgcaggctccttttcggttttcctatttatatcaattctcctatttacatctcttaacgaacggttcattgttcctttagcccgaaacata

SEQ ID NO: 183 - DNA, 91 bp, Parthenium argentatum
tgcagggatgtgtaatatgcttacttctggctgctggatgggctggtgcggcttatgtgaggtatcaagttgatatctataacctatcata

SEQ ID NO: 184 - DNA, 91 bp, Parthenium argentatum
tgcagggaaaattggatcggatgatacggagaaattgaatttgacccttacggttttcgcggatcggcttgtttctgattcggagttgtat

SEQ ID NO: 185 - DNA, 91 bp, Parthenium argentatum
tgcaggttttctgatctgcaatgtttgtcaatcataaccgtgtagcaataaacatcacgacttaaacccgtttcttcaatttcacttgcaa

SEQ ID NO: 186 - DNA, 91 bp, Parthenium argentatum; identical to SEQ ID NO: 185

SEQ ID NO: 187 - DNA, 91 bp, Parthenium argentatum
tgcaggatttgagctcccaactttttggttatagagcacaccacttatccaacaggatatcctcttgcgggagttattacttgatttaact

SEQ ID NO: 188 - DNA, 91 bp, Parthenium argentatum
tgcaggcgaccaaggttaatacgcctcaagttgtgggtataataccaggttggatacataaagtatgtgactttttgagcaacaaaatcat

SEQ ID NO: 189 - DNA, 91 bp, Parthenium argentatum
tgcaggtggctgttctgatccatttacttataattgggttgactggggtctgggggtatgctttgatctcttaacgggtcatgtcaaacag

SEQ ID NO: 190 - DNA, 91 bp, Parthenium argentatum
tgcaggcatcaagatagaagacataaacgcctcttttcttgaagttgcacaatcaacttggacgtagtaccggcatttatcgcatcttatc

SEQ ID NO: 191 - DNA, 91 bp, Parthenium argentatum; identical to SEQ ID NO: 190

SEQ ID NO: 192 - DNA, 91 bp, Parthenium argentatum; identical to SEQ ID NO: 190

SEQ ID NO: 193 - DNA, 91 bp, Parthenium argentatum; identical to SEQ ID NO: 190

SEQ ID NO: 194 - DNA, 91 bp, Parthenium argentatum
tgcagggagagtttacatggtggattttggtaaactcatggcacttgaatcattatcaattagaggtgttcaatggtgttgggatgcaata

SEQ ID NO: 195 - DNA, 91 bp, Parthenium argentatum
tgcaggcccacccatattgccacgtctagttttgcttcaccccctcctctcgcttaattgagcatacagaaatctttttcttttctcatga

SEQ ID NO: 196 - DNA, 91 bp, Parthenium argentatum; identical to SEQ ID NO: 195

SEQ ID NO: 197 - DNA, 91 bp, Parthenium argentatum
tgcaggactagtagtaccatttgacatggatcccgaggaggctgcaactgctcgattctcatgaatgcttagttgtctggtgagtttagag

SEQ ID NO: 198 - DNA, 91 bp, Parthenium argentatum; identical to SEQ ID NO: 197

SEQ ID NO: 199 - DNA, 91 bp, Parthenium argentatum
tgcaggatacccgacttgcatacaagacatttgctacactatacttcattgtcatattcgatgattctgaaaatgaacttgctatactaga

SEQ ID NO: 200 - DNA, 91 bp, Parthenium argentatum
tgcaggaaacgggtagatcaaatgtatcataggagttgtttcaaccgatgaacaaattaaaaaagtatggttagttgctcaagccattaga

SEQ ID NO: 201 - DNA, 91 bp, Parthenium argentatum
tgcaggtacaattatggtactgcggtttctactaactgatgcttcagatacctgcagatacactcaattagggcaacagcagaaaaggatc

SEQ ID NO: 202 - DNA, 91 bp, Parthenium argentatum; identical to SEQ ID NO: 201

SEQ ID NO: 203 - DNA, 91 bp, Parthenium argentatum
tgcaggtaggtaaattttagtgtgggtcaaaatgggttggctcaagttggccgacccacaatcacttgtttaattttttgtatacttatca

SEQ ID NO: 204 - DNA, 91 bp, Parthenium argentatum
tgcaggctcacatcatcggtcattataacctcggacccctccacataactcgacttgtgtgtaaccgaaggattcagcttggctaaaagaa

SEQ ID NO: 205 - DNA, 91 bp, Parthenium argentatum
tgcaggtccataatccatttggactcctcttggcccagaagctgttaaggcccacatctgattcaaagaaaacgtgatccaaacacaaaag

SEQ ID NO: 206 - DNA, 91 bp, Parthenium argentatum
tgcagggtgcaaacagaatcggttgcagaaaagattgcaccgattgctggaaagaagtttgaaagtttagcaaaatgaagatgcttaacga

SEQ ID NO: 207 - DNA, 91 bp, Parthenium argentatum
tgcaggcttgtcaaattcttcgtataattacattctattcaactgtactgcctggtccaaactaccattgtcgcgaggtatattgttctct

SEQ ID NO: 208 - DNA, 91 bp, Parthenium argentatum
tgcaggtatgggctgtattgaaacctggattcttagccctgctaaaagatccatttgatgctgagccattggacataattgtctttgatgt

SEQ ID NO: 209 - DNA, 91 bp, Parthenium argentatum; identical to SEQ ID NO: 208

SEQ ID NO: 210 - DNA, 91 bp, Parthenium argentatum
tgcagggggcgcaactaaggcaacacattgatgcaactttgggtagtggaaacctgagagaagctgtgagacttcctcctggggaggatat

SEQ ID NO: 211 - DNA, 91 bp, Parthenium argentatum
tgcaggattgtaaatgaaacaacacaattcaattaatgcaaagtatcttatgatcaaaacaaatgttcatatgaatttcattagttacaat

SEQ ID NO: 212 - DNA, 91 bp, Parthenium argentatum
tgcagggataccaaatttgggtgtttaatgtcaccaagtttcgttacttctcttgcaaattctttcttccctttgacaatcccttccttca

SEQ ID NO: 213 - DNA, 91 bp, Parthenium argentatum
tgcagggaagtacttaaattagccaaatatagggaaaaaaacgcatgcattatcatgctgtacaatggtacattttagtcattgtaccttt

SEQ ID NO: 214 - DNA, 91 bp, Parthenium argentatum
tgcaggattggaaggtcaaaacgctccggtaaagcattaatcatttggctatggattgtcgtttattttgtgtgtcggttattatctagtt

SEQ ID NO: 215 - DNA, 91 bp, Parthenium argentatum
tgcaggctaaaacaaaatcagctctttgattcggccctatatacttatattcagacaaagcatcacatacaacatctacgaaaaccctgcg

SEQ ID NO: 216 - DNA, 91 bp, Parthenium argentatum
tgcaggtctttgattttaaaccgatacaaccaacacaaagggttcaaatcagctgcaaacccaccatcatacacccttagccaacaacata

SEQ ID NO: 217 - DNA, 91 bp, Parthenium argentatum
tgcaggctgcaacttatgtctttactctatacatagcccaataagaagtgtttatattgtgcctaatactctccaataattactgatcatt

SEQ ID NO: 218 - DNA, 91 bp, Parthenium argentatum
tgcagggtaaatgcagttttctttttggagtagaaacatgattgattttcatgtcatttcgacgttcacattgctatcttaacaatctatt

SEQ ID NO: 219 - DNA, 91 bp, Parthenium argentatum; identical to SEQ ID NO: 218

SEQ ID NO: 220 - DNA, 91 bp, Parthenium argentatum
tgcaggcgagatgacgatgacgattgtgaagaagatgacgatgatctggcaggggttgagattgcatggaagcatgaggcagctgccattg

SEQ ID NO: 221 - DNA, 91 bp, Parthenium argentatum
tgcaggctgctgctatcgtttatttttcaaccttggccgctagtcaccaacccatctatgatttaattctttcttctatttcgtttttgtt

SEQ ID NO: 222 - DNA, 91 bp, Parthenium argentatum; identical to SEQ ID NO: 221

SEQ ID NO: 223 - DNA, 91 bp, Parthenium argentatum
tgcaggtttttgtacagcacccattaatgggttatttacaggggacggagccctggcaccatttggctgtgactgtccacaagaatggtca

SEQ ID NO: 224 - DNA, 91 bp, Parthenium argentatum
tgcaggtgcaatcaagatacatgtccctaaatgaatggttttctctgaaataagtggttcactacctttaaggtaatcacagaccatgatg

SEQ ID NO: 225 - DNA, 91 bp, Parthenium argentatum
tgcaggtgtgaaagtttcactggaaaagaataacatttgggctttggttgttttgattgtaggagggttggttgttttttgttgcttgata

SEQ ID NO: 226 - DNA, 91 bp, Parthenium argentatum
tgcaggtccctttggttgcaggcacagttaaccgtggtagtgaagtgattgccggtgggttaaccgttaatgactggactgcgttttgcgg

SEQ ID NO: 227 - DNA, 91 bp, Parthenium argentatum
tgcaggcacaacctcactaccatttcattttgacaactttaaacttttttatttgtcacactttaaacttttttatcgttacgtcttaaaa

SEQ ID NO: 228 - DNA, 91 bp, Parthenium argentatum
tgcagggagacttgtaagtgaaccgagcaaatacaaacgagccatgttcatgttcgttcattttactttaactaaacatatgatcgaacat

SEQ ID NO: 229 - DNA, 91 bp, Parthenium argentatum
tgcaggcatataaacaacaagacgctgaaattacgaaccaccactaacaataacatcaaattaataggaagcagaaggagatgaatcgaag

SEQ ID NO: 230 - DNA, 91 bp, Parthenium argentatum
tgcaggctcataaactattttctttttgttagttctgcacttaagtatgtcaatgactcaatggtgtcagacgttaggcactctttcaata

SEQ ID NO: 231 - DNA, 91 bp, Parthenium argentatum
tgcaggtgaactactctgcctgagcaaattattgggcagatccatagatgaagaaacgggtcgggtattttgacccggttgaccctgaaac

SEQ ID NO: 232 - DNA, 91 bp, Parthenium argentatum
tgcaggtaaaaccgtaataaccagtgatcatgcactaaagttagagacagtgcctgagtggatagttattgttggaagcggttacattggt

SEQ ID NO: 233 - DNA, 91 bp, Parthenium argentatum
tgcaggctgcactaaaaagcaatcaagcttaaaaatttatgatctaagacagtgttgacatgattacctggacaatcatcgcgtggagttc

SEQ ID NO: 234 - DNA, 91 bp, Parthenium argentatum; identical to SEQ ID NO: 233

SEQ ID NO: 235 - DNA, 91 bp, Parthenium argentatum
tgcaggctgagacggtctgccactccgccacctggttcgattccagctttcttgcaccgtttatattgtatctgggtgttctaatcctaat

SEQ ID NO: 236 - DNA, 91 bp, Parthenium argentatum
tgcaggttaaccaaactgaatatggtctaacgttttcttgaatcataatataaaccaaagtacgtaataggttaaaaaacaatttgattat

SEQ ID NO: 237 - DNA, 91 bp, Parthenium argentatum; identical to SEQ ID NO: 236

SEQ ID NO: 238 - DNA, 91 bp, Parthenium argentatum; identical to SEQ ID NO: 236

SEQ ID NO: 239 - DNA, 91 bp, Parthenium argentatum; identical to SEQ ID NO: 236

SEQ ID NO: 240 - DNA, 91 bp, Parthenium argentatum
tgcaggggcgtatgctatgcatggttttcgcatgaatttggttgagttatgaacgatttagactttagatacacttacatagattaattat

SEQ ID NO: 241 - DNA, 91 bp, Parthenium argentatum; identical to SEQ ID NO: 240

SEQ ID NO: 242 - DNA, 91 bp, Parthenium argentatum; identical to SEQ ID NO: 240

SEQ ID NO: 243 - DNA, 91 bp, Parthenium argentatum
tgcaggtaataaatgagaaatggaaaacaagtggctatgacaccgtatttatttaatttttctgtataaatcttacagttgaaaaataatc

SEQ ID NO: 244 - DNA, 91 bp, Parthenium argentatum; identical to SEQ ID NO: 243

SEQ ID NO: 245 - DNA, 91 bp, Parthenium argentatum
tgcaggctttgtatatctggaacttgttatgtgaaggagcatatgtatatgcatgtggtgatgctaaaggcatagccatagatgtacatcg

SEQ ID NO: 246 - DNA, 91 bp, Parthenium argentatum
tgcaggcaagaaggacaaaactcaaagtgaaattgtggcaaacttgcataataatagttgataatacaaaccagacggtgcaaagacaaat

SEQ ID NO: 247 - DNA, 91 bp, Parthenium argentatum
tgcaggcagccccattccactactatggagtgcatctcctccgtctttcgttgcgatgatacccgtcactttgatggccgttaccttggct

SEQ ID NO: 248 - DNA, 91 bp, Parthenium argentatum
tgcaggtttactataaagcaactaacttgcccacatcttcctgcgtcgtctttttggtggaagcgggacccgtagggccgaaggatccacg

SEQ ID NO: 249 - DNA, 91 bp, Parthenium argentatum; identical to SEQ ID NO: 248

SEQ ID NO: 250 - DNA, 91 bp, Parthenium argentatum
tgcaggatgacaaaagacgttattcaaattacaaaattaaattcaggaaaaaataattaacaccgaagaactaccttaattgacaacctta

SEQ ID NO: 251 - DNA, 91 bp, Parthenium argentatum; identical to SEQ ID NO: 250

SEQ ID NO: 252 - DNA, 91 bp, Parthenium argentatum
tgcaggctttggtacagagcccattaatgaattagttaccggagatggggcccgagcaccatttggctgtgactgcccacaagaatggtca

SEQ ID NO: 253 - DNA, 91 bp, Parthenium argentatum
tgcaggtggcaaagaggttgtggaactggatgacattttcattttagtggctctataaattgacgggctatgtgacattgttctttgcgac

SEQ ID NO: 254 - DNA, 91 bp, Parthenium argentatum
tgcaggttgatggcttgtttcgaagcaatctaccagggattttcgcagttggtgatgtggcagcattcccattaaaagtgtgttttctcta

SEQ ID NO: 255 - DNA, 91 bp, Parthenium argentatum
tgcaggagatattaatcccacaagtaaattgttttttttattctatattttatatttacttttattatatttataatttaatccggttttt

SEQ ID NO: 256 - DNA, 91 bp, Parthenium argentatum
tgcaggaggtgtggatcttaatgttccttatttcgagtatgaaccttttcccgctccagttaatctaacaaagagtgttggtgaagggtct

SEQ ID NO: 257 - DNA, 91 bp, Parthenium argentatum
tgcaggttgtcgtagatcccattggtgtgtccatatggcagatggctgctcaaccttcaagtaggaagcagttcaatcctgaaccagattt

SEQ ID NO: 258 - DNA, 91 bp, Parthenium argentatum
tgcagggatagggaagaccgcgattgcaaaggctgcatatgaacgccttgcgatacttttcaaagcccggtatagctgttttctttcagaa

SEQ ID NO: 259 - DNA, 91 bp, Parthenium argentatum
tgcaggtaaatagtgtatactgtattacaagataagcaaacacaaaatataagattaatgttcaaagaatgtaaagtgtttaccacaccat

SEQ ID NO: 260 - DNA, 91 bp, Parthenium argentatum
tgcaggctccaaacaccgccaacgcaatgccatggcagactggaattgtatgtgcattaaaatgttgtttaccaaaccatttcatggcctt

SEQ ID NO: 261 - DNA, 91 bp, Parthenium argentatum
tgcaggcaataatcctatatgtacaaatatttaatgttatgattcatacctgcaataatcctatatgtacaaatatttaacggtcagatct

SEQ ID NO: 262 - DNA, 91 bp, Parthenium argentatum
tgcaggaatgttttggaggcccacaagctcgagaattgcagtctctaaatctgaaattccatgacccgtaatggcacacgtgtaaatatgc

SEQ ID NO: 263 - DNA, 91 bp, Parthenium argentatum
tgcaggaagcacgggtcaaaaccactagttagattaaaaataatgatcattttattaaatactattatatggttaaagctaacgtttaggt

SEQ ID NO: 264 - DNA, 91 bp, Parthenium argentatum
tgcaggatcatattaatatagttattacataatctattgctttggaaatttcggctgttttattcctcaaatatatctactatcccttctt

SEQ ID NO: 265 - DNA, 91 bp, Parthenium argentatum
tgcaggttctttaatctctttttcttgtggcaacgattaatgcataccattgctaagggtcataagatgggcgggctgcgtaatgggttta

SEQ ID NO: 266 - DNA, 91 bp, Parthenium argentatum
tgcagggccaattctccggttgcagtgaggttcaatgttgcaccatagctaacgagatggtcccggtttgctgaccacaccactcgaggga

SEQ ID NO: 267 - DNA, 91 bp, Parthenium argentatum
tgcaggttgggtatttagtgacatcttgcttgctcaatgagaatcatgattttttaagattagcaattaatacagttcgcaatgatattat

SEQ ID NO: 268 - DNA, 91 bp, Parthenium argentatum
tgcaggtggctttttactttgacccattgattttagttctaaataatagtaatttcttgattatcttgattccaacaaaaaccttcttcta

SEQ ID NO: 269 - DNA, 91 bp, Parthenium argentatum
tgcagggatggcaaaaataacaaaaagtgtttggaataagcaaaccgaaaacattagggcgttaatcaagtatgagactggatataatatt

SEQ ID NO: 270 - DNA, 91 bp, Parthenium argentatum; identical to SEQ ID NO: 269

SEQ ID NO: 271 - DNA, 91 bp, Parthenium argentatum
tgcaggatcaaactttggagtgcaatttaagacgatatctgtgtttcctgcatggttttagtcatgaaatttaataatgagaacacatata

SEQ ID NO: 272 - DNA, 91 bp, Parthenium argentatum; identical to SEQ ID NO: 271

SEQ ID NO: 273 - DNA, 91 bp, Parthenium argentatum
tgcaggactacggtcagccgctgcgctgttaattagttagttaaatttccttcactgtagcggttgtgtcgccgcattgcatgcctctcgc

SEQ ID NO: 274 - DNA, 91 bp, Parthenium argentatum
tgcaggacagctggcgaaagacattgagaaattatctgatgacgctgcagctaattttgcttttatacatctcaaaaagattcttcctgat

SEQ ID NO: 275 - DNA, 91 bp, Parthenium argentatum; identical to SEQ ID NO: 274

SEQ ID NO: 276 - DNA, 91 bp, Parthenium argentatum
tgcaggaaccacaagtgcatttgttgattgtaatacttcttcggaaactgcactacttttcatctgaatgttttgcttgtctttctccttg

SEQ ID NO: 277 - DNA, 91 bp, Parthenium argentatum
tgcaggagatgagcagatggggtagaaaggagatgaagttaagaggctaacttgttactcttttacgtgtcaagggctgatgggatgcaac

SEQ ID NO: 278 - DNA, 91 bp, Parthenium argentatum
tgcaggctagaaatgtaattatcaagtacaaaggtttctcaaaccaatcattttggagaaattgctaccaaacttaaatgcaacactagaa

SEQ ID NO: 279 - DNA, 91 bp, Parthenium argentatum
tgcaggaagcgtaaattcatctatgcaacttactctgaagcctagagctgtaagggcagaatcatcgttacggcctaccagaaagacagaa

SEQ ID NO: 280 - DNA, 91 bp, Parthenium argentatum
tgcaggctgataaatgttcctactcttttcctgactgaaacttttataaatgacaaattagtaggccaaatgctttccacagaaagaacaa

SEQ ID NO: 281 - DNA, 91 bp, Parthenium argentatum
tgcaggggataaaaaattactgggagcagcctgttgaggtcagtgattctttcctatgaattataattggacaaaactatcattctatgat

SEQ ID NO: 282 - DNA, 91 bp, Parthenium argentatum; identical to SEQ ID NO: 281

SEQ ID NO: 283 - DNA, 91 bp, Parthenium argentatum
tgcaggactagcatcccttggtggatgttgagggctcaagtgatgttgaccgcttgtcaccactgactcacaactcgtgtctgtggtgaca

SEQ ID NO: 284 - DNA, 91 bp, Parthenium argentatum
tgcaggagtaccctagtgatgcgcctcctagtctcctactctaattcagctaccacaatataagcctcataagcgttatttatataaaatt

SEQ ID NO: 285 - DNA, 91 bp, Parthenium argentatum
tgcagggtacactgtagagtttatgttcacttctttagctggttgaggtgatggtttcatgttcaacactcctgttaaatgatggcttata

SEQ ID NO: 286 - DNA, 91 bp, Parthenium argentatum
tgcaggtaaagagttagtgaaggtttcctttagcatagatgccaatggcattcttcatgtcatggctgagttagtatcaacgggtaataag

SEQ ID NO: 287 - DNA, 91 bp, Parthenium argentatum; identical to SEQ ID NO: 286

SEQ ID NO: 288 - DNA, 91 bp, Parthenium argentatum
tgcaggttgcagccaaacggcttgtaatgttttgaggtacatttatcagcagaaactatgaaccttcactgttgcaattatggattatgag

SEQ ID NO: 289 - DNA, 91 bp, Parthenium argentatum
tgcaggcgcttcgtggcaaagaagacgtttcaggtgggcccttttcatgttttattgttctacaacccatatatttattcgtgtaaagatc

SEQ ID NO: 290 - DNA, 91 bp, Parthenium argentatum
tgcaggtcaaccggttttgtcccatacagatagttacccctttcgacccataatcaaccgtccattttagaacctttaatattatgcgtca

SEQ ID NO: 291 - DNA, 91 bp, Parthenium argentatum
tgcagggtccactctaaattatgatgacgtgttgaatgcccattacaaagataacagtcagttgctctcacttcagcaggtatcctctttt

SEQ ID NO: 292 - DNA, 91 bp, Parthenium argentatum
tgcagggtttttctctcaccttgatctggacaatggtacttgaaatctgtactgttagattttttttttttgtttattgtttcaagagtgt

SEQ ID NO: 293 - DNA, 91 bp, Parthenium argentatum
tgcaggtgttctacaaagtgcctgatacctaattgagtattctcattgaggttatgtattttgatgcttaataacaacagcttttttgaat

SEQ ID NO: 294 - DNA, 91 bp, Parthenium argentatum
tgcaggctttggatgtggtaatgaaggcgaatcttttcagggaaaagatttcggttgggaggggtatgtacccacgagtccacagaaggga

SEQ ID NO: 295 - DNA, 91 bp, Parthenium argentatum
tgcagggcttcttgataggattgggcttagggcccaagaaaagtgaaagtttaggacgatagagaagctcccgggtcctatatatacatag

SEQ ID NO: 296 - DNA, 91 bp, Parthenium argentatum
tgcagggtggtttgaataggctgattcttgacatggtaatattggcatcttaatattttattgttggataggacattataaagcatgcttt

SEQ ID NO: 297 - DNA, 91 bp, Parthenium argentatum
tgcaggcgaagcctcagggaacacgcattcaacaatcaagtcagtatgtgtaaccatattgtataaaatgcatgcattaatcacacaaaca

SEQ ID NO: 298 - DNA, 91 bp, Parthenium argentatum
tgcagggtttagtttgcacgatgaataacggcaaaagtagtagtagtggacaagctgctgatctgagtagcgaattcgatgcggatctgga

SEQ ID NO: 299 - DNA, 91 bp, Parthenium argentatum
tgcaggtcgtcgttgacttccaaatcgccgattctgtccagtttcagaacaactgtgagtgatgtgattacttctgcttagtctgccactg

SEQ ID NO: 300 - DNA, 91 bp, Parthenium argentatum
tgcaggtaatttgatgtgtcaaaactaaagaaaactaaagaggagctaacatccattagaaactaaaaaaatgcagataacttttatttta

SEQ ID NO: 301 - DNA, 91 bp, Parthenium argentatum
tgcaggtggttgtattccattcaaaggaccattaaatcccgaattccttgatgtatatgccccaggcatgctgggaacgttaaagttgcca

SEQ ID NO: 302 - DNA, 91 bp, Parthenium argentatum
tgcaggcaataatcctatatgtacaaatatttaatgttatgattcatacctgcaagagctggttatcaaatacattaccaattgtcatctt

SEQ ID NO: 303 - DNA, 91 bp, Parthenium argentatum; identical to SEQ ID NO: 302

SEQ ID NO: 304 - DNA, 91 bp, Parthenium argentatum
tgcaggagagcggtaccgcagttctcgacggtcgggattaatcttgtaagtgtagaagaaagaccaaccgattgaagatagatgttttttt

SEQ ID NO: 305 - DNA, 91 bp, Parthenium argentatum; identical to SEQ ID NO: 304

SEQ ID NO: 306 - DNA, 91 bp, Parthenium argentatum
tgcaggtttatgcacacaactttattccgagtcctagaggaaatctacggggttaagtactaagtagtcaactgatattgtttattgtcaa

SEQ ID NO: 307 - DNA, 91 bp, Parthenium argentatum
tgcaggcgtacaaccaacatccagagcacctaagggtcctacaaaatacacaaccgctacttgatgactttgtgattgttgactggatatc

SEQ ID NO: 308 - DNA, 91 bp, Parthenium argentatum; identical to SEQ ID NO: 307

SEQ ID NO: 309 - DNA, 91 bp, Parthenium argentatum
tgcaggcttctcatgtctttgccaacaacacatctaacacaggcactctagttcacttggaaatgggtgatttaaacttgcaaatggccga

SEQ ID NO: 310 - DNA, 91 bp, Parthenium argentatum
tgcaggagtgccgtcgtttttcaccgtgtaatgtggcaagagtttggtcattatctgtttggcttgtagaaaactataaaacaaacatgta

SEQ ID NO: 311 - DNA, 91 bp, Parthenium argentatum
tgcaggtactcattgtcctagtgggcccatgtatggcagttccttgtgcttgaaccatcatcagctagagtggcaaaacagggggtttggt

SEQ ID NO: 312 - DNA, 91 bp, Parthenium argentatum
tgcaggcatacagggagccaggcatgctcgatttcagatcccattttcggatcttaacctaaaccacaaacttcacttaaaccttttccct

SEQ ID NO: 313 - DNA, 91 bp, Parthenium argentatum
tgcaggtccataatccatttggactcctcttggcccagaagctgttaaggcccacatctgatttaaagaaaacgtgatccaaacacaaaag

SEQ ID NO: 314 - DNA, 91 bp, Parthenium argentatum; identical to SEQ ID NO: 313

SEQ ID NO: 315 - DNA, 91 bp, Parthenium argentatum
tgcaggaaaccccacatggcgtacatcagccagcttatggtgtctactgtaagacaacgtattgtggtttaactaaaaagggcataatgct

SEQ ID NO: 316 - DNA, 91 bp, Parthenium argentatum; identical to SEQ ID NO: 315

SEQ ID NO: 317 - DNA, 91 bp, Parthenium argentatum
tgcaggtggtagtggggataatgaatcaaatactgagaatatctccacatttccatggtctcttttcaccaaatctcccagacgccgtatg

SEQ ID NO: 318 - DNA, 91 bp, Parthenium argentatum
tgcaggttacaatatccttcattaaaatttcactagaaccaaaatactcagtttggtttcttccaaaacaacataatatacaacaagagat

SEQ ID NO: 319 - DNA, 91 bp, Parthenium argentatum
tgcaggcttcccacctctgggtgctcacggagtaagtgaaattatgcttttatttacagtcatttgaagttttagttcaaactgagttttc

SEQ ID NO: 320 - DNA, 91 bp, Parthenium argentatum
tgcaggacccacttgacccaagcagtaactatggttggatatcgtgcattttacaacaaacaaaagataattaaatctatttagaaactac

SEQ ID NO: 321 - DNA, 91 bp, Parthenium argentatum
tgcaggatgcaagcatatgaagaatgttagtagccaataaaaaaataaatatttaaatatatatcggtttgggatctttttgatgagagtt

SEQ ID NO: 322 - DNA, 91 bp, Parthenium argentatum
tgcaggtttcactttgggatgttgaatctagcgcttgtccctcattcacatcaacaagtagtgaggtcacgttgtggaagctgtggctaga

SEQ ID NO: 323 - DNA, 91 bp, Parthenium argentatum
tgcaggtggctttattagcatggcaatatgccgctttttggacgtcctatgtctgctcacaatttccaagggatgttttaaggaaaaagca

SEQ ID NO: 324 - DNA, 91 bp, Parthenium argentatum
tgcaggagatgaaaaacaaagaaacacaactgcaaataaaggcccaaagagacgcaagaacatgtgcaacattgtaacaacactgtctacc

SEQ ID NO: 325 - DNA, 91 bp, Parthenium argentatum
tgcaggtaactcataattagctataggttaatcagataatctataatttgaaaacaagaagctattataatgctaacgttttctataatcg

SEQ ID NO: 326 - DNA, 91 bp, Parthenium argentatum; identical to SEQ ID NO: 325

SEQ ID NO: 327 - DNA, 91 bp, Parthenium argentatum
tgcaggtcaaaatatgaaaattagcccgtttgactcaaatagttaaaaatgttcatcttcatttgactacaaaatgtataaaattcaactt

SEQ ID NO: 328 - DNA, 91 bp, Parthenium argentatum
tgcaggtttttaaagtatgagaatatcgtcttggaatcaaatatggtttaaactaaaaaaatgtgtctgtatgtgtagaacccacctttgc

SEQ ID NO: 329 - DNA, 91 bp, Parthenium argentatum
tgcaggtattacacacgccctcaaatagtcacatggtctttccatctagaaaaaatgaagtggcaatgatgtacctttattaaaaataaat

SEQ ID NO: 330 - DNA, 91 bp, Parthenium argentatum
tgcaggcaaagaaaaaatgaaggtttgctttagcatagatgccaatggtattcttgatgtctcagctaagttaatatctactggtaatgaa

SEQ ID NO: 331 - DNA, 91 bp, Parthenium argentatum; identical to SEQ ID NO: 330

SEQ ID NO: 332 - DNA, 91 bp, Parthenium argentatum
tgcaggtttaattataaatgtatcttattaatcttctaggttatgcgatgttgagtcggttgagcttcggtatgggatcatcagatgtagt

SEQ ID NO: 333 - DNA, 91 bp, Parthenium argentatum
tgcaggttgattgtaagtgggtgtacaggttaaagcgggatatatgcacatggtaaagttacgtactcgctacaaagttcatcttgtagcc

SEQ ID NO: 334 - DNA, 91 bp, Parthenium argentatum
tgcagggcagctggcaaaagacattgagaaaatgtcggatgaggctgcagctagttttgccttttcacagcttaaaaatattcttcctgat

SEQ ID NO: 335 - DNA, 91 bp, Parthenium argentatum
tgcaggtgtttcaacctgctccacatgggcttcattttcaatggagttttcagcttcttcttcatgctgcaaaaatagaaaccaacttaca

SEQ ID NO: 336 - DNA, 91 bp, Parthenium argentatum
tgcaggctaagcccattgagaatttcttattgatcttttggtccaaactcaactatttaatattttctgtcaacattcttgacaaaatgta

SEQ ID NO: 337 - DNA, 91 bp, Parthenium argentatum
tgcaggcttaatattttgtttaatactattttttttgttgtataattcaaacataaatggacgaaaaattatattggcaagttgattcgat

SEQ ID NO: 338 - DNA, 91 bp, Parthenium argentatum
tgcagggttatggtaatagagatggtaaatgaatgaactggataacaggtcaaagcgagatacgtccaaatatcatttgtccaaaaaaaaa

SEQ ID NO: 339 - DNA, 91 bp, Parthenium argentatum; identical to SEQ ID NO: 338

SEQ ID NO: 340 - DNA, 91 bp, Parthenium argentatum
tgcaggaaaatccagatttatggaaatggctaaccgggcaggaacaacctcccgaaccaatcaacacaaatcccgtgagttacacatcaac

SEQ ID NO: 341 - DNA, 91 bp, Parthenium argentatum
tgcaggagactttttcaatgcatcaatagccgaagcagtatcaggatattcattttcaccattaacattcacagaaaaactcttgaggtac

SEQ ID NO: 342 - DNA, 91 bp, Parthenium argentatum; identical to SEQ ID NO: 341

SEQ ID NO: 343 - DNA, 91 bp, Parthenium argentatum
tgcaggtgtggcttcattaacagacattgaagatcttcgtccttaattaggtttatgggttgagattctgtgtatgccaagctgattgttg

SEQ ID NO: 344 - DNA, 91 bp, Parthenium argentatum
tgcaggcccaacctttatacttttctttttaaagtgtgtggaaacatgaaatagcccgattgcacgacaagcagcagatctcacaaatggg

SEQ ID NO: 345 - DNA, 91 bp, Parthenium argentatum
tgcaggcgaaagaagcactacagggcaaagaagatatccagatgccaaattttgaagtgagtgatttagaaagcttgaacgggaagtatga

SEQ ID NO: 346 - DNA, 91 bp, Parthenium argentatum
tgcagggtgatgcagagagacgttttgatggagttaaccgtggtatatcaacctgcataattaatcatgataaacttgattatgtgctaat

SEQ ID NO: 347 - DNA, 91 bp, Parthenium argentatum
tgcaggttgtagaaaagagctttaaagatctagcgtacatccgtgtgaatgatggttcatgttctcaacaaattatcgtctacacagactc

SEQ ID NO: 348 - DNA, 91 bp, Parthenium argentatum
tgcaggcggatcatacgattcatatggtgcgtggttctgctccaccgccgactactgatgcacctggagctggaacggctaatacagctaa

SEQ ID NO: 349 - DNA, 91 bp, Parthenium argentatum
tgcagggttattattggggtccaagagagtatgagaggatgcttatatcagattatatcgatgcaccttgtttgtctctttatcttaatgg

SEQ ID NO: 350 - DNA, 91 bp, Parthenium argentatum; identical to SEQ ID NO: 349

SEQ ID NO: 351 - DNA, 91 bp, Parthenium argentatum
tgcaggaataggctacaggcctacagatgcaatgatgactccgtttagtcccaatcacgtggggcctcattcagcctccacactctatatg

SEQ ID NO: 352 - DNA, 91 bp, Parthenium argentatum; identical to SEQ ID NO: 351

SEQ ID NO: 353 - DNA, 91 bp, Parthenium argentatum
tgcagggagatctttctttgccaaatgcaacctgttttcaagcaaaaaaaataataatcttaattcttaacaagattaaatatgatgcata

SEQ ID NO: 354 - DNA, 91 bp, Parthenium argentatum
tgcaggcacagttttcagggaaccaattctctgcagaaacatccccaggttgattccaggtaattaccaattttcgttgtgttatctattt

SEQ ID NO: 355 - DNA, 91 bp, Parthenium argentatum
tgcaggttcagtccatagacttgttttcttttgcacttacaatccctaaaacctacctactccattataatcaagcccattactctaatgc

SEQ ID NO: 356 - DNA, 91 bp, Parthenium argentatum
tgcaggagctttcagaccttaagaaaactcttaatgtggaagtagaccagcttcgatccgtaagaacttttgaactcccttccaatctagt

SEQ ID NO: 357 - DNA, 91 bp, Parthenium argentatum; identical to SEQ ID NO: 356

SEQ ID NO: 358 - DNA, 91 bp, Parthenium argentatum; identical to SEQ ID NO: 356

SEQ ID NO: 359 - DNA, 91 bp, Parthenium argentatum
tgcaggggtctttagtggcatttatttggcttttgtggcactttgtgtatgtcactaaatagccttttttgtagtgtcggaatggtagttt

SEQ ID NO: 360 - DNA, 91 bp, Parthenium argentatum
tgcaggggctggtggaaccccatacagagtgaatccatcaagaaagatgttgtctttgactttgctgcattcaccctgatacaccaactct

SEQ ID NO: 361 - DNA, 91 bp, Parthenium argentatum; identical to SEQ ID NO: 360

SEQ ID NO: 362 - DNA, 91 bp, Parthenium argentatum
tgcaggtaagattcaactttgttgttagttgttccatttactttgtatgttacattggaatcggtattacgttacggttttatatatgccc

SEQ ID NO: 363 - DNA, 91 bp, Parthenium argentatum
tgcaggtctcgggaaaaccttaacagcctttgcttgtctagctgaaatttaattcaccaataagtaattttaattgtaacatagacaatgt

SEQ ID NO: 364 - DNA, 91 bp, Parthenium argentatum
tgcaggatgaataataaaacaaacaagttcaacttataatgatgattcaaagacaaataacatacactgactataagctatttatatcagt

SEQ ID NO: 365 - DNA, 91 bp, Parthenium argentatum
tgcaggccaacagaagttcaaggtttgctttaacatagatgtaaatggtattcttcatgtttcagctgaggttatatccacaggtaataaa

SEQ ID NO: 366 - DNA, 91 bp, Parthenium argentatum; identical to SEQ ID NO: 365

SEQ ID NO: 367 - DNA, 91 bp, Parthenium argentatum
tgcaggaagtggaaagacaacactcgccaaatatatttatgattgtaacttgctaaagtttgaaagcagcagttttcttgaagacattgga

SEQ ID NO: 368 - DNA, 91 bp, Parthenium argentatum
tgcaggcacaagttccatgatgcatgcttatacaagtggttcttaacttgtaacaagaatagttgtcccgtatgccgatctctattttgac

SEQ ID NO: 369 - DNA, 91 bp, Parthenium argentatum; identical to SEQ ID NO: 368

SEQ ID NO: 370 - DNA, 91 bp, Parthenium argentatum
tgcaggactcgcagcagtttcggtttctagaatcaaaacagaagatatgaggagggctataagacaaacagaacctgttattcccatcatg

SEQ ID NO: 371 - DNA, 91 bp, Parthenium argentatum
tgcagggtttacaaacaggcaatgtggacttttaatgaatctaatgcataactgatacggagttgatccaagagttagtgaacttttactt

SEQ ID NO: 372 - DNA, 91 bp, Parthenium argentatum; identical to SEQ ID NO: 371

SEQ ID NO: 373 - DNA, 91 bp, Parthenium argentatum
tgcaggcaggaaaatatttgggaaaaaggtacccatgtttgtctttccatcaaatgggggaaactcaggtatcatgttctcttcaagatta

SEQ ID NO: 374 - DNA, 91 bp, Parthenium argentatum
tgcaggtctgcacagataaatgatgaatgcaaaaatatatagaaaataaaacattataatatcagtgtcataaggcttactataagacatt

SEQ ID NO: 375 - DNA, 91 bp, Parthenium argentatum
tgcaggtaacccataaactatatgttaagtgttatagtatagagtgagttagttagctagtttagttacttgtactttgttgatcgtttga

SEQ ID NO: 376 - DNA, 91 bp, Parthenium argentatum; identical to SEQ ID NO: 375

SEQ ID NO: 377 - DNA, 91 bp, Parthenium argentatum
tgcaggtgcagtcatgttcttgtttgaaggcgcgtttggtaatattctgcacacaggagactgcaggcttacacctgagtgtttgcgcaga

SEQ ID NO: 378 - DNA, 91 bp, Parthenium argentatum
tgcaggccaaatctgatcagtcttagcccagaattctgattatatgggctgcacgctattttctaaaaaaacactgggccgttgaccaaat

SEQ ID NO: 379 - DNA, 91 bp, Parthenium argentatum; identical to SEQ ID NO: 378

SEQ ID NO: 380 - DNA, 91 bp, Parthenium argentatum
tgcaggtcttttcatttcttgagtattatccccaggttcgcaattcatccctagtatatttatagccattaatagatatattgtgaaattg

SEQ ID NO: 381 - DNA, 91 bp, Parthenium argentatum; identical to SEQ ID NO: 380

SEQ ID NO: 382 - DNA, 91 bp, Parthenium argentatum
tgcaggatccttttcgttttaaatataggcagccgtactaaaaagaaaatgtaaccttaaatgtggaaaaaaggaaagaaaggttaccgtc

SEQ ID NO: 383 - DNA, 91 bp, Parthenium argentatum
tgcaggaagaatcgcggcaatcataggcagatcgcccaaaaagttcaaatggtacagaaaagaactcgttatatataagccctgtgtagat

SEQ ID NO: 384 - DNA, 91 bp, Parthenium argentatum
tgcaggatctgcgcatgcgcataatcatcatatctaggcaatgcattctctccagcgatcaacacatgtgcttctcgtgtcgccaacgcca

SEQ ID NO: 385 - DNA, 91 bp, Parthenium argentatum
tgcaggtttactataaagcaactaatttgcccacatcttcctgcgtcgtctttttggtggaagcgggacccgtggggccaaaggatccatg

SEQ ID NO: 386 - DNA, 91 bp, Parthenium argentatum
tgcaggactaaagtcaggaggtatataggataacaattatgaattttacttaattggagttctaaattcaagaaaagaaaatctataccta

SEQ ID NO: 387 - DNA, 91 bp, Parthenium argentatum
tgcaggatgacattaaatttacacactttatcatactcttctattaataggttacccacccacccatttataaaacatcaaagtttacaaa

SEQ ID NO: 388 - DNA, 91 bp, Parthenium argentatum
tgcaggctgcaaatcattagccaacaaaaccatatggaactacatcaacttctgaacaaagattcataaattttaatagcgattattagac

SEQ ID NO: 389 - DNA, 91 bp, Parthenium argentatum
tgcaggccatccttgggtacatgttgacggagtggctccagataagccgcttgactctgcggttctgagtcgcatgaaacagttttcagcc

SEQ ID NO: 390 - DNA, 91 bp, Parthenium argentatum
tgcagggatatgcccgagtgttggcgttggtgggcacttcagtggtggcggcttcggtgctatggtgaggaaatacggcctagcggcagat

SEQ ID NO: 391 - DNA, 91 bp, Parthenium argentatum
tgcaggtaccataatcttttcttttatagaggtggtagaaccgggttgagtaacaagtattttgtatagacaggggcgtacccacatgtaa

SEQ ID NO: 392 - DNA, 91 bp, Parthenium argentatum
tgcagggatgtagaaaagttgcacattattaggtccttctcacaagaaaagcacatgaaacaccaaaagcacaaagaaattttaaccaacc

SEQ ID NO: 393 - DNA, 91 bp, Parthenium argentatum
tgcaggattttggtccgaaatggctgccgacttctactggaagaagaaatggggtcaacaggtctactatgagaatcttgatattacaaaa

SEQ ID NO: 394 - DNA, 91 bp, Parthenium argentatum; identical to SEQ ID NO: 393

SEQ ID NO: 395 - DNA, 91 bp, Parthenium argentatum
tgcaggctgcaaatcattagccagcaaaaccatatggaactacatcaacttctgaacaaagatttataaaattttaatagcgattattaga

SEQ ID NO: 396 - DNA, 91 bp, Parthenium argentatum
tgcaggtgtttatcgagcatttgcaagaactggcggttcaaggttgattaaatgtcggttttgtcatcgttgttgttgttgtagtatagat

SEQ ID NO: 397 - DNA, 91 bp, Parthenium argentatum
tgcaggttatttgaagcaccaatatcacacgtacaaacctaaaaaagataaaagatatctaaacaagtttaactctcattaattttgtatt

SEQ ID NO: 398 - DNA, 91 bp, Parthenium argentatum
tgcaggattgcaaacacaatattgaagataaccataacatttaacaaactcacataccaagaaaataaccattgtaacaatattggtgaaa

SEQ ID NO: 399 - DNA, 91 bp, Parthenium argentatum
tgcaggatgcagaaacccggttgacccgttcaccacaatctctgcagtccctcctgctgatgttccctgccaattaacaaacatatatgtc

SEQ ID NO: 400 - DNA, 91 bp, Parthenium argentatum
tgcagggtgcaacttcattcaaacaggttaattttaatcaaatagttctctagaacttgaatctattaaaccctaattacaagattaatta

SEQ ID NO: 401 - DNA, 91 bp, Parthenium argentatum; identical to SEQ ID NO: 400

SEQ ID NO: 402 - DNA, 91 bp, Parthenium argentatum
tgcaggaatgaaggttctgtatttttttctcacatttagttgtgaacatgcttgatgattcgagctatatataagagtttagtttgttgcc

SEQ ID NO: 403 - DNA, 91 bp, Parthenium argentatum
tgcaggcaacgaagaaggcggccatggtggcaaacatggagaggatgagagatgagagtctccattggaacgctgaacgagaggatagccg

SEQ ID NO: 404 - DNA, 91 bp, Parthenium argentatum
tgcaggtctatagctagggtagaaagcaacatagtttcaactagtcaaccactcatatataacctcaacaaaagtttaataaaaagttaaa

SEQ ID NO: 405 - DNA, 91 bp, Parthenium argentatum
tgcaggaagtttatctaatggacaatatgcaatgaataatcttcctattacacgttctttggtattttgtttagaaacatatttttcaatt

SEQ ID NO: 406 - DNA, 91 bp, Parthenium argentatum
tgcaggcatacagggagccaggcatgcgcgatttcagatcccattttcggatcttaacctaaaccacaaacttcacttaaaccttttccct

SEQ ID NO: 407 - DNA, 91 bp, Parthenium argentatum
tgcaggaaaatggcgccaaatttagaacagttggttatgtaaagcactaaagcagttatttaaccgccaatatcaaaggctatataaggcc

SEQ ID NO: 408 - DNA, 91 bp, Parthenium argentatum
tgcaggcggttgaggatagagatcacccccaccgataccaggaaccaccggaggcataaccatcctgcattttagtttcctaattagccaa

SEQ ID NO: 409 - DNA, 91 bp, Parthenium argentatum
tgcaggaaagaaaggggaatgagaaaatcaaatcatgtttggtgaacgatcttttgctgcatgtaaatgagaaaaatcataaagaaactaa

SEQ ID NO: 410 - DNA, 91 bp, Parthenium argentatum
tgcaggttttggtttccagatataagaactagctaagaaaatgtgcactttgacttttttaagtcaaactgactgatatgaaacttgttag

SEQ ID NO: 411 - DNA, 91 bp, Parthenium argentatum; identical to SEQ ID NO: 410

SEQ ID NO: 412 - DNA, 91 bp, Parthenium argentatum
tgcagggacaaatgggggatcactttttctcagcacatgaaaacaatcaacctagaagcaacatcaaagttacacttatataacaattctg

SEQ ID NO: 413 - DNA, 91 bp, Parthenium argentatum
tgcaggaagcgtaaattcatctatgcaacatactcttaagcctagagttgtgagggcagaatcatctttgcggcctaccagaaagacagaa

SEQ ID NO: 414 - DNA, 91 bp, Parthenium argentatum
tgcagggaatccaaacatgtaccaggtatgtttctttattataatgtttaccaattttcttaatcctgattttccacacgtaatgtatatt

SEQ ID NO: 415 - DNA, 91 bp, Parthenium argentatum
tgcaggttacagtagtcactacacgacaaaacacatccaaacaccccataacttttattgattacgcaataataaaagtatccaaatttac

SEQ ID NO: 416 - DNA, 91 bp, Parthenium argentatum
tgcaggacccgacaacaccgctttatggcccgagaatctgctttcgggagcaagaccgccatccgattgcataaaaagaacattaaccttt

SEQ ID NO: 417 - DNA, 91 bp, Parthenium argentatum; identical to SEQ ID NO: 416

SEQ ID NO: 418 - DNA, 91 bp, Parthenium argentatum
tgcaggaatcaacaagcatcaccctaagtatttatatataatccaatcattttaagaggtgtgtggcaatgctttttggaagtgattatct

SEQ ID NO: 419 - DNA, 91 bp, Parthenium argentatum
tgcaggttcattcagcaaatgtaacacttttgctttgtaatcctttttttctttttgaaaataattaaattgggttatatttaactgataa

SEQ ID NO: 420 - DNA, 91 bp, Parthenium argentatum
tgcagggttacaaattaatacttttaagttccaagaccatccaaatgaagatgccaaaacaaagttaaacaagttacaatcatgaatactg

SEQ ID NO: 421 - DNA, 91 bp, Parthenium argentatum
tgcaggtaaaggagatattgtctcattatccgtcaaattacaagcaatcagcagtcattcctctgctggatcttgcacaacagcagcatgg

SEQ ID NO: 422 - DNA, 91 bp, Parthenium argentatum
tgcaggaggtaattgggaatttgggattaagcatgatggaatgatttaatatgagaaaaatcaaatggaagatccataccgcacgagactg

SEQ ID NO: 423 - DNA, 91 bp, Parthenium argentatum
tgcaggtgaataacaagattagtgatatccaaactcttctaatcaagtccattacagaacttcacattcttaatatggatgcaatgtataa

SEQ ID NO: 424 - DNA, 91 bp, Parthenium argentatum
tgcaggctgtcctttgtctccgttctgatactggcacactaaacactagacatgaatagttttcgctgagttgactttgaatagttactga

SEQ ID NO: 425 - DNA, 91 bp, Parthenium argentatum
tgcagggaaagagaagcacaatctaattgctcttagagaacaagtcgagagaaatgtaatcatcttttgaatcaaattttccgttttacca

SEQ ID NO: 426 - DNA, 91 bp, Parthenium argentatum; identical to SEQ ID NO: 425

SEQ ID NO: 427 - DNA, 91 bp, Parthenium argentatum
tgcagggtaatactaggtgttgtaaagaggggattcctttgtattggattgccccaaggtgttagttgtgtagatattgttatctttcttt

SEQ ID NO: 428 - DNA, 91 bp, Parthenium argentatum; identical to SEQ ID NO: 427

SEQ ID NO: 429 - DNA, 91 bp, Parthenium argentatum
tgcaggaaatgcgaaatttgtttttcttaatcaactttaggttcctttgaattttagattagttcttgtttaatcaacttctgagtttgat

SEQ ID NO: 430 - DNA, 91 bp, Parthenium argentatum; identical to SEQ ID NO: 429

SEQ ID NO: 431 - DNA, 91 bp, Parthenium argentatum
tgcaggatacaagcaaagtggttaaaatgggaaaaagcttcggaaaaagcttctatatccttgtacggatcaaatattcggtcgaattaaa

SEQ ID NO: 432 - DNA, 91 bp, Parthenium argentatum; identical to SEQ ID NO: 431

SEQ ID NO: 433 - DNA, 91 bp, Parthenium argentatum; identical to SEQ ID NO: 431

SEQ ID NO: 434 - DNA, 91 bp, Parthenium argentatum
tgcaggatcacccattgaagaagtgaaaagagagtatgttaggaaggtatgtggtcaaattttcacatgtataaatgctgttagaatttaa

SEQ ID NO: 435 - DNA, 91 bp, Parthenium argentatum
tgcaggaaatgcaagaattagtagcacacaaatttacataatccaaacctttgaagaacctgatttaggaggttgtatgcacaaaaatgac

SEQ ID NO: 436 - DNA, 91 bp, Parthenium argentatum
tgcaggtgatgactttcccatcgacatgtggtgcttgtgctgttaggtgtgagactcggatgtttgtaaccagtatcctctcttatttact

SEQ ID NO: 437 - DNA, 91 bp, Parthenium argentatum
tgcaggttgctgacatactcacttagtgcttttaaagatcaaattctgtagtatttattaagagcaagctgggtatgttttgacttacata

SEQ ID NO: 438 - DNA, 91 bp, Parthenium argentatum
tgcaggtttttttcgccatcttaaccgaactcttgtttattagttcttgttaagatcaaatatgtttgttgagttcatttttttttttaaa

SEQ ID NO: 439 - DNA, 91 bp, Parthenium argentatum
tgcaggttttcacatcgtggatgcacctttgtgtagttcgtttatttgccgatagcattttgagatacgggctacccccatcctttttggc

SEQ ID NO: 440 - DNA, 91 bp, Parthenium argentatum; identical to SEQ ID NO: 439

SEQ ID NO: 441 - DNA, 91 bp, Parthenium argentatum
tgcaggatgatgcatatatttatatgtgattatattccttaattaatatataaatgaatgttggacttatgacatgtagaagattatagta

SEQ ID NO: 442 - DNA, 91 bp, Parthenium argentatum; identical to SEQ ID NO: 441

SEQ ID NO: 443 - DNA, 91 bp, Parthenium argentatum
tgcaggcagctaatcagtaacaattatgaagatattataacagttgtttttttcctaagattcaaatgttcttgacatatagaaccaacaa

SEQ ID NO: 444 - DNA, 91 bp, Parthenium argentatum
tgcagggataaaaatttcctcatattaagaacaacgtgctagtgtgacacatgaagaataaataaaagtgacatcttcccatgacaagttt

SEQ ID NO: 445 - DNA, 91 bp, Parthenium argentatum
tgcaggtgatatgtgtatgctaaaccagcatatgtgcttaagcttcttgttgatagtgcaagggccttttcgtaatatatgattgcttcac

SEQ ID NO: 446 - DNA, 91 bp, Parthenium argentatum
tgcaggctgcggcttgtttctggttgttgatgaaggggccttattcaaaaaggcgtacaacgcaatgatcatcatctggtgctccgaatcg

SEQ ID NO: 447 - DNA, 91 bp, Parthenium argentatum
tgcaggcaacaatattaatcaacactgctaaacaacaggaccaacaaattctataacataaaactaataaatgcaattaaagtaatcaaat

SEQ ID NO: 448 - DNA, 91 bp, Parthenium argentatum
tgcaggcctaaattggttaactctaggatactatgtttatagatattatatcattgtaatttattgaacgtgtctatggattcaaaataaa

SEQ ID NO: 449 - DNA, 91 bp, Parthenium argentatum
tgcaggccttattgaattcttggctttgacttttcagatttctatctttagttacattactctcaactttcatgttgcggtttattaattt

SEQ ID NO: 450 - DNA, 91 bp, Parthenium argentatum
tgcaggattgaacaaatatagcgaacagacgtcaatagcaaatcatgccagggcagaagattgaaacaggtcactcagacatcatccatga

SEQ ID NO: 451 - DNA, 91 bp, Parthenium argentatum
tgcaggcgttgcatgtgctttaacttggcccgaattatattgcaatgttgcctctaacgtagattctgccattacagccctcttctccatt

SEQ ID NO: 452 - DNA, 91 bp, Parthenium argentatum; identical to SEQ ID NO: 451

SEQ ID NO: 453 - DNA, 91 bp, Parthenium argentatum; identical to SEQ ID NO: 451

SEQ ID NO: 454 - DNA, 91 bp, Parthenium argentatum
tgcagggtaatactaggtgttgtaaagaggggattcctttgtattggattgccccaaggtgttagttgttgtgtagatattgttatctttc

SEQ ID NO: 455 - DNA, 91 bp, Parthenium argentatum
tgcaggaggagcggctggtcaaagtaccagaagaagaggtacaaacattttctatttagtttttctgacattttctaatgttttatgccaa

SEQ ID NO: 456 - DNA, 91 bp, Parthenium argentatum; identical to SEQ ID NO: 455

SEQ ID NO: 457 - DNA, 91 bp, Parthenium argentatum
tgcaggcacaacctcaccaccatttcattttgacaacttttaacttttttatttgtcacactttgttttatcgttacgtcttaaaacaaat

SEQ ID NO: 458 - DNA, 91 bp, Parthenium argentatum
tgcaggaatatgctgaagaacagaacaatggaacatcctttaatgatatgaaatttatttcaaaaaatggtcactctaaagaactatttct

SEQ ID NO: 459 - DNA, 91 bp, Parthenium argentatum
tgcaggcatagagtagaaactaacacatacgcaccatgttcaacttggaaggtgtaaccgttccagccacggccattaatgaggagcccat

SEQ ID NO: 460 - DNA, 91 bp, Parthenium argentatum
tgcaggcccaccagctgcagcccaaccaccaaaactattgaagtttgtggacacagtggaaatgacaaggggcccgcaagaatcaccgggt

SEQ ID NO: 461 - DNA, 91 bp, Parthenium argentatum
tgcaggttttccgtggttaccaaaaaaaaagattaaaaaatagcaaaatgaagttatgactttcatgaaaatctgttcagttatgaattaa

SEQ ID NO: 462 - DNA, 91 bp, Parthenium argentatum
tgcaggatctgtattgtcgatgaaccttatctggtaatcaatgaacataaaaaatttgtaatttcaacaagaatggatagaagagaaacaa

SEQ ID NO: 463 - DNA, 91 bp, Parthenium argentatum
tgcaggcgcagttaacattagcacgttatgcctcaacaccactgctcctcttatatatgacaagtgttggtcagacataagatttatgaaa

SEQ ID NO: 464 - DNA, 91 bp, Parthenium argentatum
tgcaggaatatatcaccgattcaccctcgacacctccaactatattaaggtaaagagtgctagattgtgaaaaaggggtgggtcaagctgg

SEQ ID NO: 465 - DNA, 91 bp, Parthenium argentatum; identical to SEQ ID NO: 464

SEQ ID NO: 466 - DNA, 91 bp, Parthenium argentatum
tgcaggcccatttactgttcttcatacgactcaaatttctggctttataactaagggcctgtttgtttcagcctcttaatggttcagatgt

SEQ ID NO: 467 - DNA, 91 bp, Parthenium argentatum
tgcaggtcgactaaagctgctcaagagcccaatcacagagaaccattaaatactataaggtattccatctctcagctaacttttagttgcc

SEQ ID NO: 468 - DNA, 91 bp, Parthenium argentatum
tgcagggtctacccatggtggtctcactcatgtgagttttattcatataccttcatccacaattcaaatgaaataacatagcaacttaatt

SEQ ID NO: 469 - DNA, 91 bp, Parthenium argentatum
tgcaggcccacagttgattcgctccgggttttgggtcccacgctatcaaaggtcaacataaacaagttaattagtgtctcggtgaacaatt

SEQ ID NO: 470 - DNA, 91 bp, Parthenium argentatum
tgcaggtgtaggcatgggtatttccacgttgtaaataacgattacacgcactgggaaatgtatgctattggtggcagtgcggatccgacta

SEQ ID NO: 471 - DNA, 91 bp, Parthenium argentatum
tgcaggatactaagagtacaaaaccaagatgcgtctaagaaatcattccctcctccctctttcctttgttttttattgttaaataagtcaa

SEQ ID NO: 472 - DNA, 91 bp, Parthenium argentatum
tgcaggccaaaaatgatccaattgctcctgatagagcaataccacgtgaagatattaaggtatgttcaatgtagcacaatcatgtgacaag

SEQ ID NO: 473 - DNA, 91 bp, Parthenium argentatum
tgcaggttttgataccactagtttgatagaataataagcaggttctccaatgtttcactaaaacattcattattactcatttcttattttt

SEQ ID NO: 474 - DNA, 91 bp, Parthenium argentatum
tgcaggagatttactattttctgcagctgatgccttttgaaaaaaaaaatatatatattatttgccatgctgatatacaaggagcccatgt

SEQ ID NO: 475 - DNA, 91 bp, Parthenium argentatum
tgcaggtagtcgagattctcaaacaagaaaaggtggatttcaagacttttgatatactctcggatgatgaagtaaggcaaggcctaaaagt

SEQ ID NO: 476 - DNA, 91 bp, Parthenium argentatum
tgcaggttgctattaattccctcattcggatacttagggacccatcgctttctagttatcatcaaaaggttgttgggtcactcatgtttat

SEQ ID NO: 477 - DNA, 91 bp, Parthenium argentatum
tgcaggtgctatgccagaaaaatgagcatgctccttagttagtttatcttcagtcttctgaatagccacatattcgaatatatatatatat

SEQ ID NO: 478 - DNA, 91 bp, Parthenium argentatum
tgcaggtattgaactgaagagaagcaaactgcatattgcaacagttattgggtaccttatcaaacccgtcaagatcaatggatgtcagggt

SEQ ID NO: 479 - DNA, 91 bp, Parthenium argentatum; identical to SEQ ID NO: 478

SEQ ID NO: 480 - DNA, 91 bp, Parthenium argentatum
tgcaggtcaaaccaccgtttaaaagatattctccacgtaccttataactccatgacaacaccgagggattgtaagctttggtgaccgtcaa

SEQ ID NO: 481 - DNA, 91 bp, Parthenium argentatum
tgcaggaggcagaggaactccggtagctgcaaaaccaaataaagaataaaaaactgagaactttataaaattacaaaacaaaacaaaaaat

SEQ ID NO: 482 - DNA, 91 bp, Parthenium argentatum
tgcaggagctcaagtaccgtgtcataataaagtggcaacctcgcctgcgatacagtgacatgtactactttgatattgacaaacatgtaag

SEQ ID NO: 483 - DNA, 91 bp, Parthenium argentatum; identical to SEQ ID NO: 482

SEQ ID NO: 484 - DNA, 91 bp, Parthenium argentatum
tgcaggtaagtatctttataagtaatagctaagtagttgaccgaaacacttttcatatatttcttactatccaaagaaaaaatattgatta

SEQ ID NO: 485 - DNA, 91 bp, Parthenium argentatum; identical to SEQ ID NO: 484

SEQ ID NO: 486 - DNA, 91 bp, Parthenium argentatum; identical to SEQ ID NO: 484

SEQ ID NO: 487 - DNA, 91 bp, Parthenium argentatum
tgcaggtttttaagttcttatggtaagatgacattggtcccctcctctctttatgtagtcatcccaatatgcatcattcttcttcactacc

SEQ ID NO: 488 - DNA, 91 bp, Parthenium argentatum; identical to SEQ ID NO: 487

SEQ ID NO: 489 - DNA, 91 bp, Parthenium argentatum
tgcaggtaattggatcaaatatcgacagggatagaattcctggcattgatatcagcttaaatgatggtgacacatggatgtttgctgggca

SEQ ID NO: 490 - DNA, 91 bp, Parthenium argentatum; identical to SEQ ID NO: 489

SEQ ID NO: 491 - DNA, 91 bp, Parthenium argentatum
tgcaggatgttaatgaagaggtgaaccaacttatgataaaaaattatgattttcataagtttgatctctatcatgaggacaactttttttg

SEQ ID NO: 492 - DNA, 91 bp, Parthenium argentatum
tgcaggatgagcaaaagatgcatccagttaggcgcgtataatatataaggaagcaaatagtaaaaatgtatgttaaacaagtgcataggga

SEQ ID NO: 493 - DNA, 91 bp, Parthenium argentatum
tgcaggtcttttcatttctttagtattatccccaggttcgcaattcatccctagtatatttatagccattaatagagatatattgtgaaat

SEQ ID NO: 494 - DNA, 91 bp, Parthenium argentatum
tgcagggtgaagggagatagtcagttataatctcagaggctaagttgaaggatatgatattggggaatttgcttgttatggtatatatggt

SEQ ID NO: 495 - DNA, 91 bp, Parthenium argentatum; identical to SEQ ID NO: 494

SEQ ID NO: 496 - DNA, 91 bp, Parthenium argentatum
tgcagggaaattcctctctttgatgtatgcgaactgaagataaaatcgagtgtttccagtatgctttatcgtctcctggtttggaaaggga

SEQ ID NO: 497 - DNA, 91 bp, Parthenium argentatum
tgcaggggtcaaatgagtgctgttgaccatgtttgactgataaccctgttggccaggtaggattggtggctgaccatgaaatgtattgttg

SEQ ID NO: 498 - DNA, 91 bp, Parthenium argentatum
tgcaggactccggtccgctgccgtgccgccgctgcgctaccgcattggatgtctcttgcatgagtacgggataaattaaaagttgtggact

SEQ ID NO: 499 - DNA, 91 bp, Parthenium argentatum
tgcaggtttctacaccgccgagaaggttttaatcgctctctgaatacaatttaggttaattttataattattatagattactactttacta

SEQ ID NO: 500 - DNA, 91 bp, Parthenium argentatum; identical to SEQ ID NO: 499

SEQ ID NO: 501 - DNA, 91 bp, Parthenium argentatum
tgcaggacgagtttagcttcatccatcttacctttactgaccaaccacctcggagattcaggcaagaaaaacaccgtgagtacaaagtacg

SEQ ID NO: 502 - DNA, 91 bp, Parthenium argentatum
tgcaggccaagaaagtctgagatgacaccacccaaccgtagacgttctgatttgtttgactcgataaaatccctaagattatcatcttctt

SEQ ID NO: 503 - DNA, 91 bp, Parthenium argentatum
tgcaggatacccgacttgcatacaagacttttgctacactatacttcattgtcatattcgatgattctgaaaatgaacttgctatactaga

SEQ ID NO: 504 - DNA, 91 bp, Parthenium argentatum; identical to SEQ ID NO: 503

SEQ ID NO: 505 - DNA, 91 bp, Parthenium argentatum
tgcaggctctttgtactcaaacagctattattgcattgaaaaggggatgtaattgggagaaacttctcaaatctgctgaagaaaaaggctg

SEQ ID NO: 506 - DNA, 91 bp, Parthenium argentatum
tgcagggtacgtgtgaagaaaccagagtccccgtgcacaatcgatagcgatttgaagacgttgtatccatgttataactttatctttacta

SEQ ID NO: 507 - DNA, 91 bp, Parthenium argentatum
tgcaggacttattgtgtatagcagcagatcaatctttacggttcccttcctccgcttttctattgagggcattttccgttattgaaggtga

SEQ ID NO: 508 - DNA, 91 bp, Parthenium argentatum
tgcaggaaatgggcggtagatgaaagattatgcacattctagcgcgtgatatcgacccaaaggttattgatgtttggtttattaacaacta

SEQ ID NO: 509 - DNA, 91 bp, Parthenium argentatum
tgcaggttttgtaacggggaagaaaagaagacgttgtggaggggcagccggacagtggtgactagtagtagcggagggtggctacgaggcg

SEQ ID NO: 510 - DNA, 91 bp, Parthenium argentatum
tgcaggttgctaggcttctgatggacacctgtgtggcacagttttatccaactttatttgttctagctactgatataatggacatgttagg

SEQ ID NO: 511 - DNA, 91 bp, Parthenium argentatum; identical to SEQ ID NO: 510

SEQ ID NO: 512 - DNA, 91 bp, Parthenium argentatum
tgcaggattggaaggtcaaaacgctccggtgaagcattaatcatttggctatggattgtcgtttattttgtttgtcgggtattatctagtt

SEQ ID NO: 513 - DNA, 91 bp, Parthenium argentatum
tgcaggccttcatgttgggctatgtctctaaaagtattatacacaccattatatcggtctgcacatccaggtatctacacaaaatcccatt

SEQ ID NO: 514 - DNA, 91 bp, Parthenium argentatum
tgcaggtatatagcgaaatggtggttttttttaaacaaagtaaatgataatggaattaagaaagaacattaattaaattacgtaccagcca

SEQ ID NO: 515 - DNA, 91 bp, Parthenium argentatum
tgcagggaagcttatgtgtgacaggatatgaaatctatatatttatggatattattatatatatgtagtgtttgatgtgtatattttttta

SEQ ID NO: 516 - DNA, 91 bp, Parthenium argentatum
tgcaggaaaccgccacaattacctgctacaacacgaaccagttcacttccatctgaaccgttggctgcagggttggcggtagatgagagaa

SEQ ID NO: 517 - DNA, 91 bp, Parthenium argentatum
tgcagggagaagtgtctagaagataactgcccgatatgccatgaatacatcttcacatcgaaggatcctgtgaaggcccttcggtgtggtc

SEQ ID NO: 518 - DNA, 91 bp, Parthenium argentatum
tgcagggaattttctttatcattcgatttcatttatgacttatttaatgtttttttatgttcaaaccacggtcgagatgagccagcgaagc

SEQ ID NO: 519 - DNA, 91 bp, Parthenium argentatum
tgcaggatggactgtggaagataagtttcggaaaggtggtaacaaaactggaatgaaatataaggtaagtataaaaaagttttaccaatat

SEQ ID NO: 520 - DNA, 91 bp, Parthenium argentatum
tgcaggccatcaggaactaaagtggttataaagaaaatactagaaaacaagatgggtctggtttggtctagagttgaaaaaaagcaagaaa

SEQ ID NO: 521 - DNA, 91 bp, Parthenium argentatum
tgcaggattgagcaaatatagcgaggtaacatacattaacagcaaatcatgccagggcagaagattgaaacaggtcactcagacattatcc

SEQ ID NO: 522 - DNA, 91 bp, Parthenium argentatum
tgcaggctaaaacaagaaaattacatgaataaaagagaagatttcaaccactctacccactttactttacacttattcttactcaaatacc

SEQ ID NO: 523 - DNA, 91 bp, Parthenium argentatum
tgcaggtgttaaatgggtcatgttcacatgttgaacctgaaaatcgtgtcagacacataaacccaaacacgacacgagttttagtgaactg

SEQ ID NO: 524 - DNA, 91 bp, Parthenium argentatum
tgcaggtacataaaggaaacaaaattagtctttgacccattatatgctcctttactaccataatcaatagtaagcttgataattaaaacaa

SEQ ID NO: 525 - DNA, 91 bp, Parthenium argentatum; identical to SEQ ID NO: 524

SEQ ID NO: 526 - DNA, 91 bp, Parthenium argentatum
tgcaggtcgctgttattaaatctgaccctcttgaaagtcttaaacgtgaacagtgggtcgccattactatccccaaccccccagccggtcg

SEQ ID NO: 527 - DNA, 91 bp, Parthenium argentatum
tgcaggttgataagtatgaatcttaaatagtcgcattcgatcacctaaaaatttatagtcaatacgtatgagagggtttgtatgtcagatg

SEQ ID NO: 528 - DNA, 91 bp, Parthenium argentatum
tgcagggaaagatgaaaacaaaatttaccctcaactgttgccaacaacttatgataacaaacaaaggtgatatatgaaaacttttgtaaga

SEQ ID NO: 529 - DNA, 91 bp, Parthenium argentatum
tgcaggtatgcatttgtgtcattcaagttatactgaaatgtctaaaatgccccccaattgtacaaactagctgaatgtggatataaaatgt

SEQ ID NO: 530 - DNA, 91 bp, Parthenium argentatum
tgcagggtacagaagaaacgtgggcatctgccttatgaactcctccaagaaggttactttcttgttctctgtttaaaatcttgaatgccca

SEQ ID NO: 531 - DNA, 91 bp, Parthenium argentatum
tgcaggcaagacatggaacacgtgcacctaccaagaaaagaatgagagatttggaaattttatccgttcagttagaatcccttttgcaaaa

SEQ ID NO: 532 - DNA, 91 bp, Parthenium argentatum; identical to SEQ ID NO: 531

SEQ ID NO: 533 - DNA, 91 bp, Parthenium argentatum
tgcaggaggaggagggatatacagaaggtggttttggagagaagattgaagaattggtcgttcattttcaagtagtgttatgtgtttgtct

SEQ ID NO: 534 - DNA, 91 bp, Parthenium argentatum
tgcaggcttagtttttataactacaaattcaaggatcaaatagttggttgaaattgacaaaaatgttgttgtaggatctagacaagtttag

SEQ ID NO: 535 - DNA, 91 bp, Parthenium argentatum; identical to SEQ ID NO: 534

SEQ ID NO: 536 - DNA, 91 bp, Parthenium argentatum; identical to SEQ ID NO: 534

SEQ ID NO: 537 - DNA, 91 bp, Parthenium argentatum
tgcaggtttttgtatttttagctgctgaatatagtactccaaaaaatgccctgaatcaggtatgattaacgtctttcatcccgttcccaaa

SEQ ID NO: 538 - DNA, 91 bp, Parthenium argentatum
tgcaggttagtatgttacgatttatttttcacaacagtaactttaccttcgaattatagtaagaactattttatatgttacaaatattgca

SEQ ID NO: 539 - DNA, 91 bp, Parthenium argentatum
tgcaggatattcatgtgagaatgagggaaatttgtgtttagaattgtgttaaatggacagcaaggcgaataagaatgaagatgagaatgtc

SEQ ID NO: 540 - DNA, 91 bp, Parthenium argentatum
tgcaggttgggagacttttgggtcctggatactggtgaagcccttcaactataaaatctttaattaacaaatacaattgataaatttcttt

SEQ ID NO: 541 - DNA, 91 bp, Parthenium argentatum
tgcaggtacatgcttacttcatgaaaaatctctttatttattatgcacattagcaactcctaatttcatgataaataatattcatcactcc

SEQ ID NO: 542 - DNA, 91 bp, Parthenium argentatum
tgcaggaaaagattactctgttcagaagctgattcttgggacccacacatcggaaaacgagcctaattatttaatgctggctcaggttcag

SEQ ID NO: 543 - DNA, 91 bp, Parthenium argentatum
tgcaggaaaagattactccgttcagaagctgattcttgggacccacacatcggatgatgagcctaattatcttatgttagctcaggttcag

SEQ ID NO: 544 - DNA, 91 bp, Parthenium argentatum
tgcaggtacatattcttattacccatcgagcaactactctgtatatttaaaatacagaagaaagggctcgagaaatgagaaaataaatata

SEQ ID NO: 545 - DNA, 91 bp, Parthenium argentatum
tgcaggtatataaataatcagttgttagtccaaagtgagacccttgtttttggaaacccagtattgcaagtggttagacacaaagtgtgat

SEQ ID NO: 546 - DNA, 91 bp, Parthenium argentatum
tgcaggaaagctcaattacaacactgcgggttatcgatcttcacccggacctctaacaagtgcatcattccccctccaaatgaaaaggtta

SEQ ID NO: 547 - DNA, 91 bp, Parthenium argentatum
tgcaggttataacttgaactccatgaatcatcactcacagagactggtggctctgaaaattatgtattttgggccgaggtacacaaatgat

SEQ ID NO: 548 - DNA, 91 bp, Parthenium argentatum
tgcaggaagaactgatcaagttgtggttttctcatatgagagaggtgaagcctggtatttatgtcacatacaatggagacttttttgattg

SEQ ID NO: 549 - DNA, 91 bp, Parthenium argentatum
tgcaggtaaaacgaagaacacaattgattaacaagtccattttaaattagtatacccttgttcgtaataacaatagccgtatgtacctcag

SEQ ID NO: 550 - DNA, 91 bp, Parthenium argentatum
tgcaggaataaaactgtagtttctacacaaatatattccagtcatttgtaggcatttctttatgtatattatagactcgcaaattacatca

SEQ ID NO: 551 - DNA, 91 bp, Parthenium argentatum; identical to SEQ ID NO: 550

SEQ ID NO: 552 - DNA, 91 bp, Parthenium argentatum
tgcaggacaaaacatctctgccttatgaaccggtctacagtgacgatcaagcaaggtgattccctttccatttttgcccttgtcttgattt

SEQ ID NO: 553 - DNA, 91 bp, Parthenium argentatum
tgcaggtcaaaagggttatgttatatctctattgggtcaaacaggtaaaataagaattaaaaaaaaatatttaaaaggaatggggtgaacg

SEQ ID NO: 554 - DNA, 91 bp, Parthenium argentatum; identical to SEQ ID NO: 553

SEQ ID NO: 555 - DNA, 91 bp, Parthenium argentatum
tgcagggatggagggtatagtaaatgcaggaacggtaaaaatcgtcattcacccgcctgttataggagataatcctgatgaattatgcacc

SEQ ID NO: 556 - DNA, 91 bp, Parthenium argentatum; identical to SEQ ID NO: 555

SEQ ID NO: 557 - DNA, 91 bp, Parthenium argentatum
tgcaggcaattagatccacaatcacatctcgacatcttaacatcatacgtgcaaaaacagaaccaacaaaatgaaattatcaaattacatc

SEQ ID NO: 558 - DNA, 91 bp, Parthenium argentatum
tgcaggctaggttgcttctatatattgtgtcatcccgctgttatatacatctacaccaaaaaacgtacacagagtaattgcttcaatttat

SEQ ID NO: 559 - DNA, 91 bp, Parthenium argentatum
tgcaggtatgactttatctgcactgctataaatgtacaactgtgggcagcttggttgtcctgattttagttgtactagtacattagatagc

SEQ ID NO: 560 - DNA, 91 bp, Parthenium argentatum
tgcagggggtagcccataggcagacggaggagtagggacggcggatgatggagatattggtgtttcaggagcgttggcagagttagagaca

SEQ ID NO: 561 - DNA, 91 bp, Parthenium argentatum
tgcagggcaaagcgagtagaggtttgctgataaatgttattgtgactcacttaaaaataagtttttattcgaggtggcaagatgggtgttt

SEQ ID NO: 562 - DNA, 91 bp, Parthenium argentatum; identical to SEQ ID NO: 561

SEQ ID NO: 563 - DNA, 91 bp, Parthenium argentatum
tgcagggaaagaaggggtgagtccactcgccacgaacattgtgaaacttgccacacatgttgaaaagcggctgaccatgggaaaaagagga

SEQ ID NO: 564 - DNA, 91 bp, Parthenium argentatum; identical to SEQ ID NO: 563

SEQ ID NO: 565 - DNA, 91 bp, Parthenium argentatum
tgcaggtcatcaccgaagaacgaatacatatcttcctcacatccttcttctttcctgatataatcagaagctaatttgcacaaatacgggc

SEQ ID NO: 566 - DNA, 91 bp, Parthenium argentatum
tgcaggtgcagaaaattagacattaaaagaaattggatgtttcttatcttgatgcatgctcatgatatagtcatatattaacagctaacat

SEQ ID NO: 567 - DNA, 91 bp, Parthenium argentatum
tgcaggttctggctcatcatccatcaggaccatcttgttttgttttgatgcttcatgctatgcacaatcaccgtgatacaaataaatatct

SEQ ID NO: 568 - DNA, 91 bp, Parthenium argentatum
tgcaggctttccacctttgggcgctcatggagtaagtgcaaacaagcctctttgaaatttgaaatcatgttttaaaatgtattttgcattt

SEQ ID NO: 569 - DNA, 91 bp, Parthenium argentatum
tgcaggtacaaccagatccaaaattacgctttcattcttcgttctcttttgttcctttcttatcatcgtgttgagaatcatgttgacgagc

SEQ ID NO: 570 - DNA, 91 bp, Parthenium argentatum
tgcaggctccgctgggacttctttctctgcagccccaccctccaccaaattgtgagttattattttttttttaatttaattgaattgctca

SEQ ID NO: 571 - DNA, 91 bp, Parthenium argentatum
tgcaggcatccactgaaaggctgcaggcattagcagccttcaacatgaagccagatggtcttaagcatctataacgtttagaaattttaat

SEQ ID NO: 572 - DNA, 91 bp, Parthenium argentatum; identical to SEQ ID NO: 571

SEQ ID NO: 573 - DNA, 91 bp, Parthenium argentatum
tgcaggcggtgcggcaagggaccgtagtccaataggcggtggaggcggcgtggcggcaaggaggcggcattacggagaagcggaatcaatc

SEQ ID NO: 574 - DNA, 91 bp, Parthenium argentatum; identical to SEQ ID NO: 573

SEQ ID NO: 575 - DNA, 91 bp, Parthenium argentatum; identical to SEQ ID NO: 573

SEQ ID NO: 576 - DNA, 91 bp, Parthenium argentatum; identical to SEQ ID NO: 573

SEQ ID NO: 577 - DNA, 91 bp, Parthenium argentatum
tgcagggatcacatcataagaaaaaaataaaaaataaaacccagtttgcaacaaagaaaatcaaaacaacttcgcagaatacatcacgtga

SEQ ID NO: 578 - DNA, 91 bp, Parthenium argentatum
tgcagggttttggtcagcttgtttttgtcaagttcctgcgagttcaggccagttttggtgttgactggaccaaggcactagccttgcatgt

SEQ ID NO: 579 - DNA, 91 bp, Parthenium argentatum
tgcagggatgataaaaactacaatcagattcaagaccacatgcatgttgaagaggttcaatcggatataaacaacctgaggatttgtacaa

SEQ ID NO: 580 - DNA, 91 bp, Parthenium argentatum
tgcaggactatgaaaatagccaacgcctccttactggttaaatttcaaggggtgggtattttagtcaatctgatcagaaaaaacacacgag

SEQ ID NO: 581 - DNA, 91 bp, Parthenium argentatum
tgcaggatagtggatcctaataagtatagaagatcttgaatgaaaaagatgggacccggtcttgccaagagaagcgaaaaaactaagggtt

SEQ ID NO: 582 - DNA, 91 bp, Parthenium argentatum
tgcaggaaaatccagatttatggaaatggctaactgggcaggaacaaccacctgaaccaattaacacaaatcccgtgagttacacatcaat

SEQ ID NO: 583 - DNA, 91 bp, Parthenium argentatum; identical to SEQ ID NO: 582

SEQ ID NO: 584 - DNA, 91 bp, Parthenium argentatum
tgcaggaaaaagtaaaacaaataaaaacttttttctaacgagctgcttcttcttttactagatttttaaccatttgacccaatatcaataa

SEQ ID NO: 585 - DNA, 91 bp, Parthenium argentatum
tgcaggggctggtggaatactattaagttcaaactcatcaaggaaaatgttatctttcactttaacacactcaccctgatacacatcgact

SEQ ID NO: 586 - DNA, 91 bp, Parthenium argentatum; identical to SEQ ID NO: 585

SEQ ID NO: 587 - DNA, 91 bp, Parthenium argentatum; identical to SEQ ID NO: 585

SEQ ID NO: 588 - DNA, 91 bp, Parthenium argentatum
tgcaggggtatttactcatcaagaagtgttttcatctatttacaacaccatcaagcaagtcttcaaatgtaagtgctgcaactttctttaa

SEQ ID NO: 589 - DNA, 91 bp, Parthenium argentatum
tgcaggtagcaaataaaccctagaattcaaaataacaaacacttaatcagcctatagattttgacctaaaaagatagaaggccagagcttc

SEQ ID NO: 590 - DNA, 91 bp, Parthenium argentatum; identical to SEQ ID NO: 589

SEQ ID NO: 591 - DNA, 91 bp, Parthenium argentatum
tgcaggaagttggtgattcacccaaatggcaacaagagtaaaaaagccggagaattcttgtctgtatatctagccatggcggacacgagcg

SEQ ID NO: 592 - DNA, 91 bp, Parthenium argentatum
tgcaggttatagatgggttccatacactatgatttgaaactgttttcaacctgttatacctgattcaaacaggtcaaaacccgaaaaaact

SEQ ID NO: 593 - DNA, 91 bp, Parthenium argentatum; identical to SEQ ID NO: 592

SEQ ID NO: 594 - DNA, 91 bp, Parthenium argentatum; identical to SEQ ID NO: 592

SEQ ID NO: 595 - DNA, 91 bp, Parthenium argentatum; identical to SEQ ID NO: 592

SEQ ID NO: 596 - DNA, 91 bp, Parthenium argentatum
tgcaggcatgtggagccaaaaatgtagacctgcaagctttgagctcactaattaaatagaacactgatcatctaggaagtagaattaaatt

SEQ ID NO: 597 - DNA, 91 bp, Parthenium argentatum
tgcaggctatgagtacaggggtcaaacgggtcaggtttgataacgggtcagaacagaccgcgttgacctgtcactattttttttatataat

SEQ ID NO: 598 - DNA, 91 bp, Parthenium argentatum
tgcaggactacagtccgccgccacgctactagttagttaatttctaccccgctatcacaccgccactttgcacgccccttacaggattaca

SEQ ID NO: 599 - DNA, 91 bp, Parthenium argentatum
tgcaggacttcccgcccaggacaaaccagtgccccgaaacccaaactgggtacattcatttgtttcttttgtttcagtacctacaaaggga

SEQ ID NO: 600 - DNA, 91 bp, Parthenium argentatum
tgcaggaactaaggaggctggtgtttatgcttatacatcggtaacaaatctgaccattatctatcatgatcaatcttttttggataatatg

SEQ ID NO: 601 - DNA, 91 bp, Parthenium argentatum
tgcaggtgcagatgaaccaaaaggcaaaacaaccacacaattcacaataaacatatacctgccagaaacccaagttcctaccttccaccgg

SEQ ID NO: 602 - DNA, 91 bp, Parthenium argentatum; identical to SEQ ID NO: 601

SEQ ID NO: 603 - DNA, 91 bp, Parthenium argentatum
tgcaggtactaataataaatcttggtttttatttattttttattttttttattttttggttagggttttgttgatttgtttgtaggctttg

SEQ ID NO: 604 - DNA, 91 bp, Parthenium argentatum
tgcaggacacaccaccggggcagggtgaaggacagccgcacctctcatcacatataacaccgcttcctctcatgtccgccatccttaatgt

SEQ ID NO: 605 - DNA, 91 bp, Parthenium argentatum
tgcaggtcaacaggctgcttcatttgtacttcttttgttttcctgcatatacacatttattataatcaaggtttaaaagtacaaaaacgag

SEQ ID NO: 606 - DNA, 91 bp, Parthenium argentatum
tgcaggaagtgcaagatcatgacttcatgaaccagtttcagatgatgaaaccttataacatggttggcgacttcagtgtcgattccttttc

SEQ ID NO: 607 - DNA, 91 bp, Parthenium argentatum
tgcaggcgattatagatcctggaagcattcatcgttgtatactaagaaagaagattcacatgaacgagacaataataaatttgttaatcga

SEQ ID NO: 608 - DNA, 91 bp, Parthenium argentatum
tgcaggactagcatcccttggtggattttgagggctagagtggtgttgaccgctcgtcaccaccgactcacaactcgtgtctgtagtgacg

SEQ ID NO: 609 - DNA, 91 bp, Parthenium argentatum
tgcaggttttattgggattctctgttcttgttggtgctagtgtttgggtggatctacttgtaagtcccttatatttgttgtaaatgggtta

SEQ ID NO: 610 - DNA, 91 bp, Parthenium argentatum; identical to SEQ ID NO: 609

SEQ ID NO: 611 - DNA, 91 bp, Parthenium argentatum
tgcaggtaaagtttttagggaatgggataagaaccgaagaccacccgattttgtacagtacggttcaggttttggtttttttcggcctggg

SEQ ID NO: 612 - DNA, 91 bp, Parthenium argentatum
tgcagggccggcccaatggctatcaagctaagcaatttctttaggtagaggtgaaaaaaacaaggtattattgcctaagttaatttatcct

SEQ ID NO: 613 - DNA, 91 bp, Parthenium argentatum
tgcaggtggtacagagtacaaggaacagtatgtacctagaagatcctacaaccaaagaggcaatggccgcagcagcggtggtggtggtcgt

SEQ ID NO: 614 - DNA, 91 bp, Parthenium argentatum
tgcaggcttgtaagtgccttttaacactagaaaccgagaacgaagtcgagacgtccaaatcccatttccatgcatccaattcttgtgagag

SEQ ID NO: 615 - DNA, 91 bp, Parthenium argentatum
tgcaggtacaaattgactttaattatcctagtcgatactctctctgttttggtcagtggcggagcttaaattttttttgggaggccgaaag

SEQ ID NO: 616 - DNA, 91 bp, Parthenium argentatum; identical to SEQ ID NO: 615

SEQ ID NO: 617 - DNA, 91 bp, Parthenium argentatum
tgcaggttaaaagttcgtgttaatctaggaagaccgaatagatcgattttgtttacaataaaaatcgttaccaacccgaccatttgttttt

SEQ ID NO: 618 - DNA, 91 bp, Parthenium argentatum
tgcagggctgcgcatgggcaccatagcagcaactgatcgaatcgactgtcccgcgtctagtggatcgtcaatgtgtctttgaaaatacgcc

SEQ ID NO: 619 - DNA, 91 bp, Parthenium argentatum; identical to SEQ ID NO: 618

SEQ ID NO: 620 - DNA, 91 bp, Parthenium argentatum
tgcaggggaattgtggtgaacaaagcaatttacatattgttgtagcccaatatagagtaagagaataaagatagaaacattgtgcaacatt

SEQ ID NO: 621 - DNA, 91 bp, Parthenium argentatum
tgcaggtttacgaccgttgtgtttgggtagaactctttgatgcgggtcgcctttgcagggcccacccatgggtctaaatctccccagacta

SEQ ID NO: 622 - DNA, 91 bp, Parthenium argentatum
tgcagggttagatcctgtacttgctgaaacacttccttctggtgttgcctatcaccatgctggtctcacagtatgtgcactactatcactc

SEQ ID NO: 623 - DNA, 91 bp, Parthenium argentatum
tgcaggattgacttttccaaaccttcctcctggtcaacaaaatttaattggaaacataaaaagttaagcaaggttgacaagataattatca

SEQ ID NO: 624 - DNA, 91 bp, Parthenium argentatum
tgcaggtgatatgtgatctgttgtaacagtgtaatactatcaccaaagtttaggaagcagtaggaatccttcacaccaagattccatgctt

SEQ ID NO: 625 - DNA, 91 bp, Parthenium argentatum; identical to SEQ ID NO: 624

SEQ ID NO: 626 - DNA, 91 bp, Parthenium argentatum
tgcaggcgaacccaaagacgcccccaccctcctaatatttgaggaagctatgatatatataaggcaacggattgactatagcagtcttgca

SEQ ID NO: 627 - DNA, 91 bp, Parthenium argentatum
tgcaggatcgattacacgaggttatatataaaccaacaacacaaacaagacacgttattaactcatatgagtagaaaaaattggaacaaag

SEQ ID NO: 628 - DNA, 91 bp, Parthenium argentatum
tgcagggtttgggacatgcgaaacctgtcaaaatcagttacagctcttaagggcaacataggagccattagatctatccgctactcctcag

SEQ ID NO: 629 - DNA, 91 bp, Parthenium argentatum; identical to SEQ ID NO: 628

SEQ ID NO: 630 - DNA, 91 bp, Parthenium argentatum; identical to SEQ ID NO: 628

SEQ ID NO: 631 - DNA, 91 bp, Parthenium argentatum
tgcaggtgaaagattcagtgagattgtgggtagtctatactacatggttcttgaggtcctaaaaagaaattatggcccagaatttgatgta

SEQ ID NO: 632 - DNA, 91 bp, Parthenium argentatum
tgcaggcgcgcacggatgacctgcaattcttaccatttgagaaataagtactagtttgtaattatctcatttgagttgaaaataattagaa

SEQ ID NO: 633 - DNA, 91 bp, Parthenium argentatum
tgcaggaaagaaaatacaggaagacgctataatcaacgataactcagaatgatgacaaaatatatgatattattatatttttactaacaaa

SEQ ID NO: 634 - DNA, 91 bp, Parthenium argentatum
tgcaggagatcttcccactgtcggatcataaacaagctgttgcggttgggtaatgttggcttcagccttttgcagctcaactgactctgta

SEQ ID NO: 635 - DNA, 91 bp, Parthenium argentatum
tgcaggtgtcataaataagcgatgatatcttaaaaacgtatagtacagctataaaggagttattatttctttgtttttattttatttttta

SEQ ID NO: 636 - DNA, 91 bp, Parthenium argentatum
tgcaggctcatgacggtcgggaagccactcaacggtgagtgacggccactcgagtgcgtgtgtgatgaccaaatcgtataaaaaaggtgtg

SEQ ID NO: 637 - DNA, 91 bp, Parthenium argentatum
tgcaggttacaaatgctctacatggtcaacatgtttcttttgacaaatgactgagactaggaaggaatcctatacgaagttttatgctaag

SEQ ID NO: 638 - DNA, 91 bp, Parthenium argentatum
tgcaggttttgtcatgaggccgcaaacagattataagcttatttcaccgtaacggtaaacttgtaattctaaatcctctaaaaataacgat

SEQ ID NO: 639 - DNA, 91 bp, Parthenium argentatum
tgcaggaatcaagccaacaaaataccgaaaacaattgggcttctttgaatgctagtaccattaatagctgtaatcgaaaattcactccaga

SEQ ID NO: 640 - DNA, 91 bp, Parthenium argentatum; identical to SEQ ID NO: 639

SEQ ID NO: 641 - DNA, 91 bp, Parthenium argentatum
tgcaggtaacattgcctttcacattgtcgctaaagactgcattttcaacccactgttatacaaatgggttaatttgggttatgttttatat

SEQ ID NO: 642 - DNA, 91 bp, Parthenium argentatum
tgcagggcagagcaagggaagctggtgagataaacaagagcttgcttacgcttggcagagttataaatacattagttgaacactcagggca

SEQ ID NO: 643 - DNA, 91 bp, Parthenium argentatum
tgcaggtaataatgcataatcaagcaagttatatatttgtattattccagtaataacgatcatctagtttctgttattcatttgaaatgac

SEQ ID NO: 644 - DNA, 91 bp, Parthenium argentatum
tgcaggtattgtcattacttctatatctcaggtagcaaccgcaaacaatttgcaatagcgacactaatgtatagcctattacaacaacaga

SEQ ID NO: 645 - DNA, 91 bp, Parthenium argentatum; identical to SEQ ID NO: 644

SEQ ID NO: 646 - DNA, 91 bp, Parthenium argentatum
tgcaggagaacaagctcaatcccactcccctttttcagctgatttactagatactggaatagacccctgagttccattgatgggtactttt

SEQ ID NO: 647 - DNA, 91 bp, Parthenium argentatum
tgcaggattgcaacatatatgggccttattgacatttggcaagtggagttggggaggacgcacatgtccagcagctagtggcacacacatt

SEQ ID NO: 648 - DNA, 91 bp, Parthenium argentatum
tgcaggtatgaaatatttctacatcccctctttgtgaaatacctttattcataccatgtttgcttctcgtacacatgatcgtaactccttt

SEQ ID NO: 649 - DNA, 91 bp, Parthenium argentatum
tgcaggcttttgaggtgttccagactcatgagatctgagctgataagcggcagacgaagtctcgaacaagagtgtcaaaatggttgccacc

SEQ ID NO: 650 - DNA, 91 bp, Parthenium argentatum
tgcaggtagatatcccatcttcttttgctgcattgcttttgaagaactgtgaggcaccatacccgaatcatggacatgttattttagcaga

SEQ ID NO: 651 - DNA, 91 bp, Parthenium argentatum
tgcaggctaatgctcctactgtattttcacttctactatcagagccccaacccgaggttcactaatcattacactcttcggatagggtttt

SEQ ID NO: 652 - DNA, 91 bp, Parthenium argentatum
tgcaggtgtgaactaattatcaaaatgaaaattaaatcaatcatggtttgtaaaatatagctaaccaagtttttgacaaaccatttttctt

SEQ ID NO: 653 - DNA, 91 bp, Parthenium argentatum
tgcaggtcttccagctctcgagtgcaggcttcatataagggatgatccagaaaaatgttctgagtattccaatattgaccccgtataagac

SEQ ID NO: 654 - DNA, 91 bp, Parthenium argentatum; identical to SEQ ID NO: 653

SEQ ID NO: 655 - DNA, 91 bp, Parthenium argentatum; identical to SEQ ID NO: 653

SEQ ID NO: 656 - DNA, 91 bp, Parthenium argentatum
tgcaggaaagagtcttagcataatacaggtgagatacataaaataagaaattagattgttaaaatcaacctgagttatggagacaacatag

SEQ ID NO: 657 - DNA, 91 bp, Parthenium argentatum
tgcaggccacaaattattcacaaatcaaatcataaattctagttattcataattagttttatggacgcaaggcgctccaaggcgtttaggt

SEQ ID NO: 658 - DNA, 91 bp, Parthenium argentatum
tgcaggagtcagcaacatcttgcacagggctgcatacattagaagataaatgaataaatgttcacataaattaaaaaaataaaaaatagaa

SEQ ID NO: 659 - DNA, 91 bp, Parthenium argentatum; identical to SEQ ID NO: 658

SEQ ID NO: 660 - DNA, 91 bp, Parthenium argentatum
tgcaggaccggtccggttttgatcatagagtgtcattttccaatccaacatgttcatgtctgcagtgggctcggttaatataggcttgggt

SEQ ID NO: 661 - DNA, 91 bp, Parthenium argentatum
tgcaggttggtgatagtaacactacagccataatatagcttccaagatttcagtttaagataaataccatctctagtttgtgttttatttc

SEQ ID NO: 662 - DNA, 91 bp, Parthenium argentatum
tgcaggatcaatcaagctatcgagatttgatttgagaaaaaccgtccttgaatattgcttccacggtctcccgaggtatgttttaactccg

SEQ ID NO: 663 - DNA, 91 bp, Parthenium argentatum
tgcaggtgaggaacgtcttcatttttttcttttaattttgtccgtttgtgtttgaagattatataccttagtctaatttcaagtatatata

SEQ ID NO: 664 - DNA, 91 bp, Parthenium argentatum
tgcaggattgagaatgaacgtaccaaatttggttatgtacaataggctacataaataaatgcacagacaatactaaaaaaataacattttg

SEQ ID NO: 665 - DNA, 91 bp, Parthenium argentatum
tgcaggcagattgtgtaaccttcttcaggctgttgacattgaatgaacggagggatgcatccctcacttccaattatgcggatccaaaaga

SEQ ID NO: 666 - DNA, 91 bp, Parthenium argentatum
tgcagggggttatctctttgatttttgacaaagctgttctcgagcctacgttttgccctatgtatgctcaactgtgttcagatctcaacaa

SEQ ID NO: 667 - DNA, 91 bp, Parthenium argentatum
tgcaggtccagtttgttcaaaacctcaattagttggaaattgtggttcttataccttttgagcttttcggcacatctgatgtattaatttt

SEQ ID NO: 668 - DNA, 91 bp, Parthenium argentatum
tgcaggaacaggaagacgacgaggaggatatggatgtcgaggatttaaccccgcaacagcaaaaggagctagcggaaatcaggagaaagaa

SEQ ID NO: 669 - DNA, 91 bp, Parthenium argentatum; identical to SEQ ID NO: 668

SEQ ID NO: 670 - DNA, 91 bp, Parthenium argentatum
tgcaggagacatggatgattcgttttcccgaattcaaaatataaataacttgttatacataaccaaccatgcctatgtgtcttattccaaa

SEQ ID NO: 671 - DNA, 91 bp, Parthenium argentatum
tgcaggagattcaaggagctctacaagtgagaaattgaactttcggatttcaatccaggttttgtagttttaaacctttcaataaatttcg

SEQ ID NO: 672 - DNA, 91 bp, Parthenium argentatum
tgcaggtgacgagttaccaatgtcatattaacattccagatatgttttttcattatttatagtcttatttgagagttgaaggtttatgaca

SEQ ID NO: 673 - DNA, 91 bp, Parthenium argentatum
tgcaggctgtagtgctatatcaaatctacacctaagtaacctagaaccgtcaaaatactagtagtacctagcatgatgtaccctaaaactt

SEQ ID NO: 674 - DNA, 91 bp, Parthenium argentatum
tgcaggctgcatcacacgcatgcaccaagtaaggtggaccagaatgaatcacattgttacaacaactgcagtttaaataacctgaaaacat

SEQ ID NO: 675 - DNA, 91 bp, Parthenium argentatum
tgcaggtgatgttgatgaggaggagaaggcaattgtcctatacaaggtaacaaaacactaagtagagtattcttatattctagtgtgtaat

SEQ ID NO: 676 - DNA, 91 bp, Parthenium argentatum
tgcaggctgcaacatttttcactccaattgttatctcagtgagatgtatgaggcggtacaccactgatcaatgaaatctcaaagtgaagag

SEQ ID NO: 677 - DNA, 91 bp, Parthenium argentatum
tgcaggcaattatttacaaaatgaataagtcacaaaaggatcgaaatagaacaaaagatgaaactaacggacgctcacactatgctcataa

SEQ ID NO: 678 - DNA, 91 bp, Parthenium argentatum
tgcaggaccgcttcttataccacgtaaagctattgaaacatgtgaagtaatgggatacaccattccaaaagatagtcaaatattagttaat

SEQ ID NO: 679 - DNA, 91 bp, Parthenium argentatum; identical to SEQ ID NO: 678

SEQ ID NO: 680 - DNA, 91 bp, Parthenium argentatum
tgcaggttcaaaatccatgtttcacgatcactaaactgatcgcgggctcaaacgtatacgcttgccagctaaagtccagcacaataaggct

SEQ ID NO: 681 - DNA, 91 bp, Parthenium argentatum; identical to SEQ ID NO: 680

SEQ ID NO: 682 - DNA, 91 bp, Parthenium argentatum
tgcaggaagtaggtcccagtcatcgagaagtttaggcaaaaagaaagctcttatatctcctagttcttcctttaggtcagagaggtttaag

SEQ ID NO: 683 - DNA, 91 bp, Parthenium argentatum; identical to SEQ ID NO: 682

SEQ ID NO: 684 - DNA, 91 bp, Parthenium argentatum
tgcaggtaaacatgaaactgaatgaagagcggcaacactttctaacccacaagacgcaagataatacctcgaaaactagagagataacata

SEQ ID NO: 685 - DNA, 91 bp, Parthenium argentatum; identical to SEQ ID NO: 684

SEQ ID NO: 686 - DNA, 91 bp, Parthenium argentatum
tgcaggaacatataactaccctatagattcactatgtataatatatgccacaaacggtccgttgtcctctgtggaggtttccctaacccct

SEQ ID NO: 687 - DNA, 91 bp, Parthenium argentatum
tgcagggtcagataaatatgcattttgccattcaatttgagtccactgatggctcaaaggctcgagcaaccaggtcataacttcttgttgt

SEQ ID NO: 688 - DNA, 91 bp, Parthenium argentatum
tgcaggatatgagagtgatggacccacaacatcaaatgagatgaccccattgtcttttacaatgtttttatgagtaagtaatgtcgagaaa

SEQ ID NO: 689 - DNA, 91 bp, Parthenium argentatum; identical to SEQ ID NO: 688

SEQ ID NO: 690 - DNA, 91 bp, Parthenium argentatum
tgcaggtcacacaaacaattacattttaataaatcaccaaaaaaatatggatttttaacaagattcagggtaaataatattgcctgtatgc

SEQ ID NO: 691 - DNA, 91 bp, Parthenium argentatum
tgcaggtgctttaaaactatagtaaaaggaggagggctccttaattgaagagggccccacgagtactcaggtgggaccatgctttgtttgg

SEQ ID NO: 692 - DNA, 91 bp, Parthenium argentatum
tgcaggaagcattcacgaagacagcccagctccaaaataccttcttgaatccggggttgaccgcaaactcttaaatttttatggtagtaga

SEQ ID NO: 693 - DNA, 91 bp, Parthenium argentatum
tgcaggacagaggatccattgggaactccgatcttgaaatggatatgtagaaaaggggagcgtggaagtggttttgtcaaagcatcggcca

SEQ ID NO: 694 - DNA, 91 bp, Parthenium argentatum
tgcaggcataagaacttgccaaggaaacacaatcaccaaaaaccaatgaatcaaacttctttagaaacatgtacctttgaaacaagtaaag

SEQ ID NO: 695 - DNA, 91 bp, Parthenium argentatum
tgcaggttaacctgtacacagacgctgagactctaaatatgatgggtaagctggataccggttttgtaatgtgtaactttaggtttgtttt

SEQ ID NO: 696 - DNA, 91 bp, Parthenium argentatum
tgcagggaagatagataatatgttccctcaattactgcataatatatttgtacaatgtgaaaaagcatgcacattgggatcttgctgctga

SEQ ID NO: 697 - DNA, 91 bp, Parthenium argentatum
tgcagggcaaaccgagtagaggtttgatgataatttgttacttggaatcacataaaaattagtctctagtagaggtggtaagacgaggttt

SEQ ID NO: 698 - DNA, 91 bp, Parthenium argentatum
tgcaggtatggccaaaagaaccaaagagagattcaataattgaaaagtggtgtaatgagatgacttgtttaaagcagacaaaggaatgaaa

SEQ ID NO: 699 - DNA, 91 bp, Parthenium argentatum
tgcagggattgtgtgctgctttcagaaagcaaaaatacaggaaaatcataaagcccccacataataccagatccctgcacacacatagaac

SEQ ID NO: 700 - DNA, 91 bp, Parthenium argentatum
tgcaggtataactccaatagccatcttgagtgccgctcgccagtcttctctttcaagcaatccattaacaacctactagaatgtccaacca

SEQ ID NO: 701 - DNA, 91 bp, Parthenium argentatum
tgcagggctttgtaggatggcttgtgtttgtagttatttaagggacatgtgtttaagtgatcatttgtgggaaaatcatatgaagaaaaga

SEQ ID NO: 702 - DNA, 91 bp, Parthenium argentatum
tgcaggatcaattgtcagttgtcataaccacaagagactcaaaacacataggttcacaaacttaaaagaacatgacatgataatataatat

SEQ ID NO: 703 - DNA, 91 bp, Parthenium argentatum
tgcaggaaaacaactgctgggcgtatgagggttaactgaaaagcgttgtggaagggcgaaaccatcttttggtaaatctggggatcgaggt

SEQ ID NO: 704 - DNA, 91 bp, Parthenium argentatum
tgcaggtagttataagaaacatgttaattgcgttagcatactttatagtattcattccttagaagaagaatgcaagtactaagaaggaaag

SEQ ID NO: 705 - DNA, 91 bp, Parthenium argentatum
tgcaggggtcaaattaccaaagaaggtaattcgtctggcatatcatgtcaatttttttcgtgcgaactgagatttatggtcttagcagtta

SEQ ID NO: 706 - DNA, 91 bp, Parthenium argentatum
tgcaggctacgagctgttctttgaggtctgctatttcaggattcaatcgtgacagtaaatccctttcctctggggttaagtgatcaacaag

SEQ ID NO: 707 - DNA, 91 bp, Parthenium argentatum; identical to SEQ ID NO: 706

SEQ ID NO: 708 - DNA, 91 bp, Parthenium argentatum
tgcagggttacatgggccactctagattagcaaaatagaagaaactattgatgcaagtgccgatggtcctttgctcctatgtcatactggc

SEQ ID NO: 709 - DNA, 91 bp, Parthenium argentatum
tgcaggctgaaataactgaatttgttcatcaacctcgtctccttgccaatccaaactatttaaaaaagaaacaatgcacaaatgttaaaag

SEQ ID NO: 710 - DNA, 91 bp, Parthenium argentatum
tgcaggttcttagcatacaacagctctacagaatcagtactatgtattttgatgacaaatacggcacacatagtctttctgcagatgtata

SEQ ID NO: 711 - DNA, 91 bp, Parthenium argentatum
tgcaggttaacgaggatgtggaggtcaatgcttgagtgccatcgtaatcaatgtcgagccattggagctgctaaacggttagacgctattg

SEQ ID NO: 712 - DNA, 91 bp, Parthenium argentatum; identical to SEQ ID NO: 711

SEQ ID NO: 713 - DNA, 91 bp, Parthenium argentatum
tgcagggtgtcgacttgggctgcagggtgctccgctgggacaaggcctgtgcccactttgatatctcaattattgcttctttggctccaag

SEQ ID NO: 714 - DNA, 91 bp, Parthenium argentatum
tgcaggatttaacataatcagccattctatcttttcattgataatcggcctttttttgtatcaaggatcaataatcgataatcattaatct

SEQ ID NO: 715 - DNA, 91 bp, Parthenium argentatum
tgcaggtttcttgccatcttgagtgacaaaaggtatgaagtcgtgtttgaccgcgtagggcaaagcaccaacgaccgcatcaaaaacgtca

SEQ ID NO: 716 - DNA, 91 bp, Parthenium argentatum; identical to SEQ ID NO: 715

SEQ ID NO: 717 - DNA, 91 bp, Parthenium argentatum
tgcaggagaagaaattaaaagtcaaaatgattatcctacagttggaaatcaagaaatattgattagaagtcatacgttgtcacggcctccg

SEQ ID NO: 718 - DNA, 91 bp, Parthenium argentatum
tgcaggaaatgtgcatattatgaaaaagaaagtaggaggctacattactaaagctttaataagcaaatattttcacaacagacagtcaatg

SEQ ID NO: 719 - DNA, 91 bp, Parthenium argentatum
tgcaggtgaaagattcagtgagattgtgggtagtctatactacatggttcttgaggtcctagaaagaaattatggcccagaatttgatgta

SEQ ID NO: 720 - DNA, 91 bp, Parthenium argentatum
tgcaggccatacatatagagctagagatggtaattagcagcagctggccggaaccggtggtgcgagtgcaatcactctcagacagcggaat

SEQ ID NO: 721 - DNA, 91 bp, Parthenium argentatum
tgcaggcagtggataacacaaccggattttcaaattttatgtaattttttcccttccaaaatctcatttaccaagactcaaaactttgttt

SEQ ID NO: 722 - DNA, 91 bp, Parthenium argentatum
tgcaggtttggcttttgtccccttttgtcacctttggcccctcatgtttggtactttagtgacttggcaaatttggtccttcttttttagt

SEQ ID NO: 723 - DNA, 91 bp, Parthenium argentatum
tgcaggagcaagaacttctagatctttaatcggttgatactccatcccaaaaactcgttgaacaccatcagtcattgacagttttaggcat

SEQ ID NO: 724 - DNA, 91 bp, Parthenium argentatum
tgcaggtgatatattaaaaatacaacctttccctctaactttactaactgacttatttagtttgttactagacacaacactataatcttct

SEQ ID NO: 725 - DNA, 91 bp, Parthenium argentatum
tgcaggcttcaggtatctatgcaacaagccggatttggatcatatcaactaatggtttgacccgagtccatgaccgaactaagtggattgt

SEQ ID NO: 726 - DNA, 91 bp, Parthenium argentatum; identical to SEQ ID NO: 725

SEQ ID NO: 727 - DNA, 91 bp, Parthenium argentatum
tgcagggaaaccatgagtgctgcttttttcggctattctatagtaaagttctcctagagttgcgccagtttgaacccatgcagtttcttct

SEQ ID NO: 728 - DNA, 91 bp, Parthenium argentatum
tgcaggtgtgtgattggttaaactatacaattgtatccatttgataaagttaagatgtttgctaacgtttctttgtaggttgcgaactcgg

SEQ ID NO: 729 - DNA, 91 bp, Parthenium argentatum
tgcaggttcaaatcatgaaacatcataggttaaaatgcgataatgcagaaatattcataatctaggaagcagacacgcttagcagacggat

SEQ ID NO: 730 - DNA, 91 bp, Parthenium argentatum; identical to SEQ ID NO: 729

SEQ ID NO: 731 - DNA, 91 bp, Parthenium argentatum
tgcaggcgagaaaaacaactagcaagtgcttcataagttgagtatttttggaacgtcggttgccgcaatgtctatgagcctgtttatcaaa

SEQ ID NO: 732 - DNA, 91 bp, Parthenium argentatum
tgcaggtcccagtgcttcgatctataaacatcgatttccgtaacagcttgaaacctaacaggtttcccacaggcttttcatcgcaaatagt

SEQ ID NO: 733 - DNA, 91 bp, Parthenium argentatum; identical to SEQ ID NO: 732

SEQ ID NO: 734 - DNA, 91 bp, Parthenium argentatum
tgcagggatcagaaagtgggcctcggtaggctccagctgcgtcagatgggagccccgtctgaactgggctcttgatcttgttactcttatg

SEQ ID NO: 735 - DNA, 91 bp, Parthenium argentatum
tgcaggtgattatctcaacataaaagacaggagccatctttaatagcaggtgttcagttgtcataatatgttgttgatcaaactctgtagt

SEQ ID NO: 736 - DNA, 91 bp, Parthenium argentatum
tgcaggttttgaagagagattccagaaggaagctagtctttgctcatcgtccattcgtccttctttagtcaaggtaataactaacacgcgc

SEQ ID NO: 737 - DNA, 91 bp, Parthenium argentatum
tgcaggaagctttgatgatcttgttctcaatctctctattggggtaatcatattacacaaataatttgcatatgtttttagattgattttt

SEQ ID NO: 738 - DNA, 91 bp, Parthenium argentatum
tgcaggatgggaatgaagtgttcttcaggatcaagcgcagtacccagcttaagaagttaatgaatgcctactgtgataggcagtctgtgga

SEQ ID NO: 739 - DNA, 91 bp, Parthenium argentatum
tgcagggacatcatacccaagtccacctgtctgcaataacaacaattatacactgttgagtcttggtgcacaatcagaaaagcttggccca

SEQ ID NO: 740 - DNA, 91 bp, Parthenium argentatum
tgcagggaatctaagtcatgatagcattgctctcgaattgtcgattccatctgtggaataatttttttaattaaaactatttatgaacatt

SEQ ID NO: 741 - DNA, 91 bp, Parthenium argentatum
tgcaggaaagtaattcagatactgctcaaacttaaatgacaattaatagtgttgataaactaattacctgagtgcccttgctttctttttc

SEQ ID NO: 742 - DNA, 91 bp, Parthenium argentatum; identical to SEQ ID NO: 741

SEQ ID NO: 743 - DNA, 91 bp, Parthenium argentatum
tgcaggaagaaaacacagcaccaacaccaaagcaactccagcgacgacactataacccaaatgttgaacgaatgaaacaagatgaaggcta

SEQ ID NO: 744 - DNA, 91 bp, Parthenium argentatum; identical to SEQ ID NO: 743

SEQ ID NO: 745 - DNA, 91 bp, Parthenium argentatum
tgcaggacttcacgagggatgtgcaaagcattcccattcaaaaaatcttgtagcttcgaaaggtttagctcgtttccaaacttgatggtgc

SEQ ID NO: 746 - DNA, 91 bp, Parthenium argentatum
tgcaggtttggcttttgtctccttttgtcacctttggcccctcatgtttggtacttaagtgacttggcaaatttggtccttcttttttagt

SEQ ID NO: 747 - DNA, 91 bp, Parthenium argentatum
tgcaggatgactatttgatatattgcttgaattcaaagtagatgtgagatgcgtctactttgactttttggtattttgtttgaattcaagg

SEQ ID NO: 748 - DNA, 91 bp, Parthenium argentatum
tgcagggacgacgagatcaaccccatcacaatgatgttactagatcaaaaagacgacgatgattctcaacctaacaaggttagcttgacat

SEQ ID NO: 749 - DNA, 91 bp, Parthenium argentatum
tgcagggcttatttgataataaggagcttcaggcaactgccgcttcacctgcagaccccaaacaggtctcacccaagggtcttcctttcca

SEQ ID NO: 750 - DNA, 91 bp, Parthenium argentatum
tgcagggatgtaaccttagatgcctcgtccattcttcgatactacaagcgtacactagctgcaatagcaccacaaaatgctaaatgtatag

SEQ ID NO: 751 - DNA, 91 bp, Parthenium argentatum
tgcaggcaaagcaatccaagaatgccaacacgtgaagccgatttataccggccaacttgtccctccaggttgtgcaaagtcttttgaagtg

SEQ ID NO: 752 - DNA, 91 bp, Parthenium argentatum; identical to SEQ ID NO: 751

SEQ ID NO: 753 - DNA, 91 bp, Parthenium argentatum
tgcaggttttggtttccagatataagaactagctaagaaaatgtgcactttgacttttttaagtcaaactgactgatatgaaacttgatag

SEQ ID NO: 754 - DNA, 91 bp, Parthenium argentatum
tgcaggtatcgcacacaccagggcagaaaacaatcttgtaatcattatcaaacttctcaaacttgaaccaattgcttaaggtctctttgcc

SEQ ID NO: 755 - DNA, 91 bp, Parthenium argentatum; identical to SEQ ID NO: 754

SEQ ID NO: 756 - DNA, 91 bp, Parthenium argentatum; identical to SEQ ID NO: 754

SEQ ID NO: 757 - DNA, 91 bp, Parthenium argentatum
tgcaggctgcaaggcgggaaatataaattgctccagtttacttgaaacaaacgatcccgatcattcaaacataatggcctgtgatatttgc

SEQ ID NO: 758 - DNA, 91 bp, Parthenium argentatum
tgcagggttgatggtatcaaatttaaactgttggtctttttctttgttcggttttttaccatgtgtgtgttatgctagcatcatctttttt

SEQ ID NO: 759 - DNA, 91 bp, Parthenium argentatum
tgcaggatttcagaggttcggagggggtaaatctcatgtgattagtcgtctttttatataatgaatatagtataagttttttccttgattt

SEQ ID NO: 760 - DNA, 91 bp, Parthenium argentatum
tgcaggtttacaatggccacaccaaggagcatagaactaaaacagctttaaaatttgcagagctttattataattctgattttggggatca

SEQ ID NO: 761 - DNA, 91 bp, Parthenium argentatum
tgcaggtgccctttgccgacaactgcaaccacagaaccatgttcgcgtgctactttcagcaagctggaagacatgtacctacaaaaccatg

SEQ ID NO: 762 - DNA, 91 bp, Parthenium argentatum
tgcaggaaatggctcctgcaaagcaaatgaaagttatgcaagaatttcagaagcaatctgcacaaatggatatgacagtaagatacagcac

SEQ ID NO: 763 - DNA, 91 bp, Parthenium argentatum
tgcaggcgagggcgggtctcccgaaactaaaagagaatagggaccatgacaacttgcaacaaaagttctaaacaaacaaaaataagtaaca

SEQ ID NO: 764 - DNA, 91 bp, Parthenium argentatum
tgcaggctcagctgtttatagcctttttgttttataagttattagtggtgttgcttgtttaaacttttaaaaaataaatgtatagtagaat

SEQ ID NO: 765 - DNA, 91 bp, Parthenium argentatum; identical to SEQ ID NO: 764

SEQ ID NO: 766 - DNA, 91 bp, Parthenium argentatum; identical to SEQ ID NO: 764

SEQ ID NO: 767 - DNA, 91 bp, Parthenium argentatum
tgcaggtagcttaacttaccacatgcatgcatttgcagggaaaacatacagattcagaatatcaaatgtggggttgacaacatccatcaac

SEQ ID NO: 768 - DNA, 91 bp, Parthenium argentatum
tgcaggtttggctcatgttgatgaaaatagcttggtttagtttctttttactcattcaaagtcaaaagtaaagaaatttaaaaagttttca

SEQ ID NO: 769 - DNA, 91 bp, Parthenium argentatum
tgcaggttttgtcttggttccctgtggcgaaagtttgaccatcgggatgccatgctgatgcaaatgagaaatcccagtgtccatttaaaga

SEQ ID NO: 770 - DNA, 91 bp, Parthenium argentatum; identical to SEQ ID NO: 769

SEQ ID NO: 771 - DNA, 91 bp, Parthenium argentatum; identical to SEQ ID NO: 769

SEQ ID NO: 772 - DNA, 91 bp, Parthenium argentatum
tgcaggatataagcaagaaagaatagcgggtatgggtcttaatgaagaagaactcaaggcgaataaagtaagaatcaatatacccatgtga

SEQ ID NO: 773 - DNA, 91 bp, Parthenium argentatum; identical to SEQ ID NO: 772

SEQ ID NO: 774 - DNA, 91 bp, Parthenium argentatum; identical to SEQ ID NO: 772

SEQ ID NO: 775 - DNA, 91 bp, Parthenium argentatum
tgcaggcaggataatatgatagttgatttttattaattagtgtgtataagttagctgtgtgttatctgattttagtactgcaagcataatt

SEQ ID NO: 776 - DNA, 91 bp, Parthenium argentatum
tgcaggctctttgaaggtaaaacttgtataaaaagatggaagtataaactttataaaataaaaactaaatattgctatgatttttgttgca

SEQ ID NO: 777 - DNA, 91 bp, Parthenium argentatum
tgcaggtacaacatataattaaaatcaaaatgtagcatactagcatatatgtgtgaaatacaataaagttgtatatcatgacatacacatt

SEQ ID NO: 778 - DNA, 91 bp, Parthenium argentatum
tgcaggtggtggtggtggcggtagagatgagcacataagagtgtttggagtcgttgaaccaccaccaccaaaggtgtacattgagtgttct

SEQ ID NO: 779 - DNA, 91 bp, Parthenium argentatum; identical to SEQ ID NO: 778

SEQ ID NO: 780 - DNA, 91 bp, Parthenium argentatum
tgcagggttggaacttttgctgtgtcatggctgttgggaacgttcttgatggtgtcggttatcccaccaatcctgaaagggccgaggagtt

SEQ ID NO: 781 - DNA, 91 bp, Parthenium argentatum
tgcaggcatatgccacgaagttatatccagctacatcctgcttttttcttaattcctttaccacacatgagattatgtactccagcagaat

SEQ ID NO: 782 - DNA, 91 bp, Parthenium argentatum; identical to SEQ ID NO: 781

SEQ ID NO: 783 - DNA, 91 bp, Parthenium argentatum; identical to SEQ ID NO: 781

SEQ ID NO: 784 - DNA, 91 bp, Parthenium argentatum
tgcaggagattctttacagcttagcatctcaaatacttctaacgaataatcgcgatcgattgtaatataagaatatatgcttctgctgaaa

SEQ ID NO: 785 - DNA, 91 bp, Parthenium argentatum
tgcagggaagaaaaactagtggagcgcgcaaaagcacttaaagtaaacattggaactgaccctgatacagacattggccctgtgatcagta

SEQ ID NO: 786 - DNA, 91 bp, Parthenium argentatum
tgcaggttaaccaaactgaatatggtctaccgttttcttgaatctatacaattatatatttcaatataatactcgcaccatattgattctc

SEQ ID NO: 787 - DNA, 91 bp, Parthenium argentatum
tgcaggtctacaatattctcatcttctacgaaaacgtttgacctcacacttggaaaaacatttatgaatttacttgaattataatcatacc

SEQ ID NO: 788 - DNA, 91 bp, Parthenium argentatum
tgcaggtgattagtgggctgcaccaaagctattggccattgggcttcaaatcgtacttaaacataaaggtgtaaagaaatggtttgggcct

SEQ ID NO: 789 - DNA, 91 bp, Parthenium argentatum
tgcaggtcttttatgtttgtgggcatcggagcgtgttgtagaaatcgttgaccgttatgacgatgactgtcttcccgatgcctacagcact

SEQ ID NO: 790 - DNA, 91 bp, Parthenium argentatum
tgcaggaacggtaagcattcaccttttgttgtcctattttgggtgattaacttaagaactccattacatgttgcaagttttgttacagaaa

SEQ ID NO: 791 - DNA, 91 bp, Parthenium argentatum
tgcaggggcgtattaacaataaataaaataaataaattgtttatattgaaaacattatcttgtaagtattctagaagtttaggttgttagt

SEQ ID NO: 792 - DNA, 91 bp, Parthenium argentatum
tgcaggtgatgttgatgaggaggagaaggcaattgtcctatacaaggtaacaagacactaagtagagtattcttatattctagtgtgtaat

SEQ ID NO: 793 - DNA, 91 bp, Parthenium argentatum
tgcagggtacggaaacgtgtacggggacgggccgaagcgtttccaatccgattccttgaccgattcgagaagtcaacgacgtttctgctgc

SEQ ID NO: 794 - DNA, 91 bp, Parthenium argentatum; identical to SEQ ID NO: 793

SEQ ID NO: 795 - DNA, 91 bp, Parthenium argentatum
tgcaggagcaaaagcatttagatgtttgataggtggataagccaagctaaatactcagtgaacaccataagtcatagacagctttaggcat

SEQ ID NO: 796 - DNA, 91 bp, Parthenium argentatum; identical to SEQ ID NO: 795

SEQ ID NO: 797 - DNA, 91 bp, Parthenium argentatum
tgcagggaatttgtaaaatctgttattcaaggtgttcttccaggaattgctttgaaaattttcctcatcattctaccttcaatcttaatga

SEQ ID NO: 798 - DNA, 91 bp, Parthenium argentatum
tgcaggcccgaaactgtgaattgctcggctagaacaggattggacatgctggaaaaacattacgcagatgctattggttttgatatcgttt

SEQ ID NO: 799 - DNA, 91 bp, Parthenium argentatum; identical to SEQ ID NO: 798

SEQ ID NO: 800 - DNA, 91 bp, Parthenium argentatum
tgcaggttaatgtgccgccaacccatcaattttatacatatttttaactttcctttatatcatctacaaaatatagagatgatccattata

SEQ ID NO: 801 - DNA, 91 bp, Parthenium argentatum
tgcaggtaattattattcttatgtccattatatttggaatattaagatttgagattatagtttgattccgactttttaacattatcatatc

SEQ ID NO: 802 - DNA, 91 bp, Parthenium argentatum
tgcaggagaaaaagataatcttgttcaagggcaaggagaagagataagagagaaaaatgcaggtagatattaaccttgcataatctaagat

SEQ ID NO: 803 - DNA, 91 bp, Parthenium argentatum; identical to SEQ ID NO: 802

SEQ ID NO: 804 - DNA, 91 bp, Parthenium argentatum
tgcaggagatttactattttcttcagctgatgcctttttaaaaaatatataatatattatttgccatgctgatatacaaggagcccatgtt

SEQ ID NO: 805 - DNA, 91 bp, Parthenium argentatum
tgcaggctggtttgttcaagggtttgaagaactcgccgtttacagacatttgtctagctaatatacatctaagcgggtcaactggttcgag

SEQ ID NO: 806 - DNA, 91 bp, Parthenium argentatum
tgcaggaaatgggtcgatcaaaggtatcataggagttgttttaacggatgaaccgattcaaaaagtatggtttgttgctcaagccattaga

SEQ ID NO: 807 - DNA, 91 bp, Parthenium argentatum
tgcaggtgttacgcatgcaagaaaaccaacatcaagtgttgaggctgacatagtaggtggtggatcaatcacctgctctcatgctcaacca

SEQ ID NO: 808 - DNA, 91 bp, Parthenium argentatum; identical to SEQ ID NO: 807

SEQ ID NO: 809 - DNA, 91 bp, Parthenium argentatum
tgcaggccacatctggaaacaaatccctgttagtttataattactgagtgttgaacagatatatatatacatatatatatatggtgaatac

SEQ ID NO: 810 - DNA, 91 bp, Parthenium argentatum
tgcaggctgcaattacatatattggaagaaatgaatgtgtacatgatttcagtcaccatgattctcttttcactgatattttcaaatttat

SEQ ID NO: 811 - DNA, 91 bp, Parthenium argentatum
tgcaggcggcgccgcgggggaccatagtctaattagcggtggcggcgcggcggcaaggagcgcttgatggagaagcggaatcaacaagacg

SEQ ID NO: 812 - DNA, 91 bp, Parthenium argentatum
tgcaggtttaaatgaactttttttatgattattataacatatttcaagaatcaatagtgcaattataagatattattcatttttccttttt

SEQ ID NO: 813 - DNA, 91 bp, Parthenium argentatum; identical to SEQ ID NO: 812

SEQ ID NO: 814 - DNA, 91 bp, Parthenium argentatum
tgcaggtgttcctttgaaatcaatttggtttatggttggtccacttggttcctggtcttatatatgctccttaaaaaatttattgccgaag

SEQ ID NO: 815 - DNA, 91 bp, Parthenium argentatum
tgcaggtaacaattacaggggtaagggaccatctgcatccaccagttcgatcacttctagaagcacaaccatgaagaaactatcatcttca

SEQ ID NO: 816 - DNA, 91 bp, Parthenium argentatum
tgcaggctgtgatatttgaagctttgtctatccagcatcctccattgttttccatacactcatttgtttcaattcctgaaagcagcatata

SEQ ID NO: 817 - DNA, 91 bp, Parthenium argentatum
tgcaggatgcggttaacctttttgatgaaatgatcgatagaggtattcaaccgaatactgtgacatacactgctcttgtatgtggctattg

SEQ ID NO: 818 - DNA, 91 bp, Parthenium argentatum
tgcaggaatgtttatacaacaagggcttacctcatttgtatgctctctttttttatatgattattttgtaattctacataaatgaatgttt

SEQ ID NO: 819 - DNA, 91 bp, Parthenium argentatum
tgcaggactatggtccgccgccacgctgttaattagttagttaaattttcttcaccgtagacgtcgtgtagccgcattgcatgcctctcgc

SEQ ID NO: 820 - DNA, 91 bp, Parthenium argentatum
tgcaggttgagcaaaacaatgcaaaaattaatcaccattttccttccatactaggggtgtaacgagccggaccactcgtgagccactcgat

SEQ ID NO: 821 - DNA, 91 bp, Parthenium argentatum
tgcaggaaacgttaacaagattcactttgtgcaaccaacctattaagcaagtaaatatacaaaagcagctataatcaactgacaagtctag

SEQ ID NO: 822 - DNA, 91 bp, Parthenium argentatum
tgcagggtttgatcttgataaggtacacccgaaatttcacgtactgatttgcttaggtggtatgatgaatgggttgggtaacatgtcaaaa

SEQ ID NO: 823 - DNA, 91 bp, Parthenium argentatum
tgcaggaggtgttttacagcttagtatctcaacttataatgaataatcaacgaaagcgtcattaaatatatgtgcttctgttggaatttgt

SEQ ID NO: 824 - DNA, 91 bp, Parthenium argentatum
tgcaggcatgaaaatgatctacagcatcagcagaaacttgacacttgccacaaggttggtccatcgttgatgtttctgttttcatgattcg

SEQ ID NO: 825 - DNA, 91 bp, Parthenium argentatum
tgcagggctgttgcatatattcctttaacaattcttgcagttcctgcatcagtacttactgtaagatctcaacgccacacacatgcattta

SEQ ID NO: 826 - DNA, 91 bp, Parthenium argentatum; identical to SEQ ID NO: 825

SEQ ID NO: 827 - DNA, 91 bp, Parthenium argentatum
tgcagggcccgcatcatccctccccccgttcagagtcttcattcatcggacaccatccggccttacataacttgataaagctgtcttttgc

SEQ ID NO: 828 - DNA, 91 bp, Parthenium argentatum; identical to SEQ ID NO: 827

SEQ ID NO: 829 - DNA, 91 bp, Parthenium argentatum; identical to SEQ ID NO: 827

SEQ ID NO: 830 - DNA, 91 bp, Parthenium argentatum
tgcaggtatgaaatatttctacatcccctctttgtgaaatacggagtacctttattcataccatgtttgcttctcgtacacatgatcgtaa

SEQ ID NO: 831 - DNA, 91 bp, Parthenium argentatum
tgcaggttggaacattgtatcaacgtcaaagttccattttatgtaccaaaactcgtattgtcaccactttcataccctaacacaataactt

SEQ ID NO: 832 - DNA, 91 bp, Parthenium argentatum
tgcaggtttagaatgattaaaaacaatgaaaatgatattattttgatgattcaagaaacctttttcctatgcttccttttcttgtttcttc

SEQ ID NO: 833 - DNA, 91 bp, Parthenium argentatum
tgcaggcttttaggtaactttttcaatagctgggatgttcgttcaagtgcataagaatttgagtagggtttggtcaagagataaagaagca

SEQ ID NO: 834 - DNA, 91 bp, Parthenium argentatum; identical to SEQ ID NO: 833

SEQ ID NO: 835 - DNA, 91 bp, Parthenium argentatum
tgcaggatggtacggaagttgaatattgggccgcaaggggaatatgtcatagaatattaaccaagttttaaaagtaataggtcactaaaaa

SEQ ID NO: 836 - DNA, 91 bp, Parthenium argentatum
tgcaggtccacgcccacctcctccaccaggtggtgcactgccgccacgaccaccaggttccagcctaagaccgccacgcccgtcagaggga

SEQ ID NO: 837 - DNA, 91 bp, Parthenium argentatum; identical to SEQ ID NO: 836

SEQ ID NO: 838 - DNA, 91 bp, Parthenium argentatum
tgcaggaacacatttcactcatcaaatacattattattattattattattattaaaatgaatatcaaaataatgaattaataaaaatccta

SEQ ID NO: 839 - DNA, 91 bp, Parthenium argentatum
tgcaggtctttaacatattcattaggatcattgcgcaacctattttgacccgagcacgtttcatccctccatttaaaaggaccaaacttgt

SEQ ID NO: 840 - DNA, 91 bp, Parthenium argentatum
tgcaggtagcccttcatgggttcgaacgcacgcggtaacaccgctgccacccccttgcgggtaggctggcaggtacccgtagtaggttcct

SEQ ID NO: 841 - DNA, 91 bp, Parthenium argentatum; identical to SEQ ID NO: 840

SEQ ID NO: 842 - DNA, 91 bp, Parthenium argentatum
tgcaggttgctgcagggattatttaccccaaaaatatgtactgctgaatatgacccaaaaaaagtgatatcacaataaaagttgagggagt

SEQ ID NO: 843 - DNA, 91 bp, Parthenium argentatum
tgcagggtcaattaatccggtccacatacatcctagggcttcagagcttatgtttcttgtttccgggtctctccaagtagggtttgtggat

SEQ ID NO: 844 - DNA, 91 bp, Parthenium argentatum
tgcaggaagctacagataatgaacccatatatttaacaaataacatgtgcactggataaacagcggaattagtgtctcctttcacataact

SEQ ID NO: 845 - DNA, 91 bp, Parthenium argentatum; identical to SEQ ID NO: 844

SEQ ID NO: 846 - DNA, 91 bp, Parthenium argentatum
tgcaggcggcgcaacggaggaccgaagtccaatgtacggcggaccgaagtcggcggcaataataaaaaaacaaagaggaaggcggcggcaa

SEQ ID NO: 847 - DNA, 91 bp, Parthenium argentatum; identical to SEQ ID NO: 846

SEQ ID NO: 848 - DNA, 91 bp, Parthenium argentatum
tgcaggtaacaaagtaatatgaaaatatttaagtgatgtttggtattgcgttttggaagtgattatgtgatacgaaatattcagaacaaga

SEQ ID NO: 849 - DNA, 91 bp, Parthenium argentatum; identical to SEQ ID NO: 848

SEQ ID NO: 850 - DNA, 91 bp, Parthenium argentatum; identical to SEQ ID NO: 848

SEQ ID NO: 851 - DNA, 91 bp, Parthenium argentatum
tgcaggcgtgggatggcgtttgtttttgtgtgtgtggttgtaggagggaggggtgggggttggaggtgaggagttggtgacgggcaagcaa

SEQ ID NO: 852 - DNA, 91 bp, Parthenium argentatum
tgcaggattggtagggaggccattgtgtcggcaaaggcgaaaatgtagagccacagtatatatatcgtcttcgggcaacacttgtgtaaat

SEQ ID NO: 853 - DNA, 91 bp, Parthenium argentatum
tgcaggttaggaaaattcagctttgcatactcaccacgaagcttataagccgcccgatcatacgcataggccgcggcttcagccgactcat

SEQ ID NO: 854 - DNA, 91 bp, Parthenium argentatum; identical to SEQ ID NO: 853

SEQ ID NO: 855 - DNA, 91 bp, Parthenium argentatum
tgcaggtgttaatatatttgttgatctatgtcttatattcttgtacacttccctagctccatgctactgctattataataaaataaccacc

SEQ ID NO: 856 - DNA, 91 bp, Parthenium argentatum
tgcagggaagatagataatatgttagttcacttgaatactgcataaatatatgtacagcgtgaaaaagcatgcacattggattcttgctgc

SEQ ID NO: 857 - DNA, 91 bp, Parthenium argentatum
tgcaggactacggtccgctgctaccggctgccgccgccctgccacatcggatgcctcttgcgtgattacgggatcatttaaaattgcgaac

SEQ ID NO: 858 - DNA, 91 bp, Parthenium argentatum; identical to SEQ ID NO: 857

SEQ ID NO: 859 - DNA, 91 bp, Parthenium argentatum
tgcaggaggaaagtttgtctagacaagtacatggtgacggtaccaaggtttatggctaagtaacatgaggggtaaaaatggtatttacagc

SEQ ID NO: 860 - DNA, 91 bp, Parthenium argentatum; identical to SEQ ID NO: 859

SEQ ID NO: 861 - DNA, 91 bp, Parthenium argentatum
tgcaggcacttgtggccacaaaacgacaaatttggatcagttggattaataggattgtcatccatctccatgttgcatgattcatgatctg

SEQ ID NO: 862 - DNA, 91 bp, Parthenium argentatum
tgcaggtagtaaaatgggcgggttgggtaaaggaaaatttttggtacactttccgtctaaggaactataaataaccagtttaagttatttc

SEQ ID NO: 863 - DNA, 91 bp, Parthenium argentatum
tgcagggacttatcctttaataacttaagtggcccggttccgaggtttccttctaagaccttcaagtaagcttttaatcactccccaatct

SEQ ID NO: 864 - DNA, 91 bp, Parthenium argentatum
tgcaggtacttcattctctcactaattttctccctcctcacctgtttacggtcacaatcatttatctttttgcaaaacaaataattatata

SEQ ID NO: 865 - DNA, 91 bp, Parthenium argentatum
tgcaggacttccccttctgatgaattttccatctttataaatgtataacattggcaccccagtagacagctctaagttgattaccttttag

SEQ ID NO: 866 - DNA, 91 bp, Parthenium argentatum; identical to SEQ ID NO: 865

SEQ ID NO: 867 - DNA, 91 bp, Parthenium argentatum
tgcagggaacaaaaccgataagcttcgaagtataagaggtgaaagtgaaaactataacgccttgtgcacctgttttctagctcgtgacctt

SEQ ID NO: 868 - DNA, 91 bp, Parthenium argentatum
tgcaggagtacgttttgcatatcaactaaccaaaattctctaactagtaaaaatagataaaaaagagaaaagaagagaaaaggtaacattc

SEQ ID NO: 869 - DNA, 91 bp, Parthenium argentatum
tgcaggtaggaataacctcttcttctgcatctctagtccacaaagaccactccagttgtactgctgttattggatgaatcgcgtgtgctct

SEQ ID NO: 870 - DNA, 91 bp, Parthenium argentatum; identical to SEQ ID NO: 869

SEQ ID NO: 871 - DNA, 91 bp, Parthenium argentatum
tgcaggttcatacaaccgctactagacaaacaagaaacaccagaatccgtaatgcagctctttgaaacatcaagatctctgagaaataagc

SEQ ID NO: 872 - DNA, 91 bp, Parthenium argentatum
tgcaggtctgaattatgctctctctatctctctcttttttttctttcaatattggatgcgggaaaaatgtgcgagttgggtaatagaatgg

SEQ ID NO: 873 - DNA, 91 bp, Parthenium argentatum
tgcaggagatgtgcttgtttgacccgtgattgcagcttgagttactgacatgtcaccgttgttgacacttgttatgtcatgaatgcttgat

SEQ ID NO: 874 - DNA, 91 bp, Parthenium argentatum
tgcaggacaccaggaaaatcaaaatccagattatgataatagatttaaaacatcttacaaaattctaataaaaatttaaaggttagtatca

SEQ ID NO: 875 - DNA, 91 bp, Parthenium argentatum
tgcaggaaccaaactgaaactgaaagctgcaatattttggcaaaaagttctccaaaataccataccaaacaaataaataaagtactaaaat

SEQ ID NO: 876 - DNA, 91 bp, Parthenium argentatum
tgcaggtagggtccgaaaccaggtattttgtgcatttctgtatacaaccttgggtgctttccaattaaagcctacatgacctatttatact

SEQ ID NO: 877 - DNA, 91 bp, Parthenium argentatum
tgcaggagattcaaggagctctacaagtgagaaattgaactttcggatttcaatccaggttttgtagttttaaacctttcaataaatttca

SEQ ID NO: 878 - DNA, 91 bp, Parthenium argentatum
tgcaggctgagaaagccaaggtgatccaaacactgctttttctttcaggattcaacacattaatgcaaaccatgtttggtactagattacc

SEQ ID NO: 879 - DNA, 91 bp, Parthenium argentatum; identical to SEQ ID NO: 878

SEQ ID NO: 880 - DNA, 91 bp, Parthenium argentatum
tgcaggttagaaggtatatttctgtcggtgaccgctgaaaagtttaaagataagattgtggtcaagatttcttgccatgttttaccgttgt

SEQ ID NO: 881 - DNA, 91 bp, Parthenium argentatum
tgcaggatttgaagcccccacctgttagagatagagagatgaaagccatgtaaatagtattaagctttatattatttatgacgacatccaa

SEQ ID NO: 882 - DNA, 91 bp, Parthenium argentatum; identical to SEQ ID NO: 881

SEQ ID NO: 883 - DNA, 91 bp, Parthenium argentatum; identical to SEQ ID NO: 881

SEQ ID NO: 884 - DNA, 91 bp, Parthenium argentatum
tgcagggtagaggtaagtttgtctacatcttaccctcctcagaccctaccttagctttgctattggtgggatttactgagtatgatgatga

SEQ ID NO: 885 - DNA, 91 bp, Parthenium argentatum; identical to SEQ ID NO: 884

SEQ ID NO: 886 - DNA, 91 bp, Parthenium argentatum; identical to SEQ ID NO: 884

SEQ ID NO: 887 - DNA, 91 bp, Parthenium argentatum
tgcaggttaacaatgcaagacatgttggggacatcaattcaggagattcatccttccaaaaggttgttaatactttttgaactggtgaggt

SEQ ID NO: 888 - DNA, 91 bp, Parthenium argentatum; identical to SEQ ID NO: 887

SEQ ID NO: 889 - DNA, 91 bp, Parthenium argentatum
tgcaggttttgtaacggggaagaaaagaagacgttgtggaggggcagccggacagtggtgactggtagtagcggagggtggctacgaggcg

SEQ ID NO: 890 - DNA, 91 bp, Parthenium argentatum
tgcaggagccggagccctctcatcaacactccgatcagatgctctgcacttaccaatgccgccaactcgtaatcctctctctctctctcta

SEQ ID NO: 891 - DNA, 91 bp, Parthenium argentatum
tgcagggaggaatgctaggtacagttaatcttagaaataatatgacgctgtggcatatactgggcgagcatgttaaaaaaggtcgaatata

SEQ ID NO: 892 - DNA, 91 bp, Parthenium argentatum
tgcaggtttacagtacgataattcgggcttttggtaaggataaaagggtggctgcagctgttgctgttgtagaatggttgaagctgaagag

SEQ ID NO: 893 - DNA, 91 bp, Parthenium argentatum; identical to SEQ ID NO: 892

SEQ ID NO: 894 - DNA, 91 bp, Parthenium argentatum; identical to SEQ ID NO: 892

SEQ ID NO: 895 - DNA, 91 bp, Parthenium argentatum
tgcagggatggtttttatttaattactttttggaaaacaaaaacgaaatataaaaatttattaggttatatcctaggggtttcacaggata

SEQ ID NO: 896 - DNA, 91 bp, Parthenium argentatum
tgcaggcgaaaccaccgttaaaacatgacaacactgagggattgtaagctttggtgaccgtccaggcggggaaaggtttgagcgataagat

SEQ ID NO: 897 - DNA, 91 bp, Parthenium argentatum
tgcaggcggagaacctccaccacattgatcgtctattcagtaagcgtcattattcattcgatgttctctcgtttagtagctcgacaatttg

SEQ ID NO: 898 - DNA, 91 bp, Parthenium argentatum
tgcagggatggctaacatgtcagccaccgcgctactacaaaaagcagctcaaatggggtccacaagaagcacaaactctagggtttccggt

SEQ ID NO: 899 - DNA, 91 bp, Parthenium argentatum
tgcaggatcgagtatcgacactgaaactccacctaatgatggagaaaacgcaacacctaagctccaagaaaacggtaatttatattcttac

SEQ ID NO: 900 - DNA, 91 bp, Parthenium argentatum
tgcaggttaaacgaagagattttctttaggaacgatggtgttgcatgtggtgggtggagacgatgagatttatggtttgcgatggtcgtga

SEQ ID NO: 901 - DNA, 91 bp, Parthenium argentatum; identical to SEQ ID NO: 900

SEQ ID NO: 902 - DNA, 91 bp, Parthenium argentatum
tgcaggatagagtgaagtgtttggggttttgtttcagggtttctggttttactttgtctacaatttactattattatttttatcttacttt

SEQ ID NO: 903 - DNA, 91 bp, Parthenium argentatum; identical to SEQ ID NO: 902

SEQ ID NO: 904 - DNA, 91 bp, Parthenium argentatum
tgcaggggctggtcaggttactaaagaaaaacttgaattcaagcatagactttcaatagctcttggggcagctaaaggtgatcctctgcaa

SEQ ID NO: 905 - DNA, 91 bp, Parthenium argentatum; identical to SEQ ID NO: 904

SEQ ID NO: 906 - DNA, 91 bp, Parthenium argentatum
tgcagggagacttcgtcctcaggttcacggacaaaccttgaagtacaacatgaaacttagagagggtcgtgggttttctcttgaggaatta

SEQ ID NO: 907 - DNA, 91 bp, Parthenium argentatum; identical to SEQ ID NO: 906

SEQ ID NO: 908 - DNA, 91 bp, Parthenium argentatum
tgcagggttagtcaaagattaatttatgcttcatttattatttatcaatagatgttgattatatttatttacttttatttaaattttttat

SEQ ID NO: 909 - DNA, 91 bp, Parthenium argentatum; identical to SEQ ID NO: 908

SEQ ID NO: 910 - DNA, 91 bp, Parthenium argentatum
tgcaggcagttttgaacatcaacaacgagctctagaacttcaaaacccttattcaagataacaccaaacataagcattgatttaaacattg

SEQ ID NO: 911 - DNA, 91 bp, Parthenium argentatum
tgcagggatatgaattgaatcgtgaaaatcgtattgtgtgtgtgtttagtttaatttagacttgtacacgaaccgaacggacacaaacggg

SEQ ID NO: 912 - DNA, 91 bp, Parthenium argentatum
tgcaggagagggtattcggacgtggcaccaccgtgcccctccctgcggccccgccattcaacgcccctcacagccccgctgcctcgcgagt

SEQ ID NO: 913 - DNA, 91 bp, Parthenium argentatum; identical to SEQ ID NO: 912

SEQ ID NO: 914 - DNA, 91 bp, Parthenium argentatum
tgcaggctactcaaataacacatccagctggttgtgccaatgttttgggtgccaaaggcaatggattgggctggttcagtaccctcttaat

SEQ ID NO: 915 - DNA, 91 bp, Parthenium argentatum
tgcaggtgaataactcaacataaaaaacaggtgccacctttaatagcaggcgttcagttgtcataatatgttgttgatcagactttgtagt

SEQ ID NO: 916 - DNA, 91 bp, Parthenium argentatum; identical to SEQ ID NO: 915

SEQ ID NO: 917 - DNA, 91 bp, Parthenium argentatum
tgcaggcctaggtatttacatccgaatcgctgatccattatggtctctactgaatattagaatttacaacagcaaataaccatattaagtt

SEQ ID NO: 918 - DNA, 91 bp, Parthenium argentatum
tgcaggaatgaaggttctgtattttttttctcacatttagttgtgaacatgcttgatgattcgagctatatataagagtttagtttgttgc

SEQ ID NO: 919 - DNA, 91 bp, Parthenium argentatum
tgcaggaaccaaaaaggtaaattataatattttggttttgtgaattattaatctagaaatgacattttgaaatacgtgaactaagtggatg

SEQ ID NO: 920 - DNA, 91 bp, Parthenium argentatum
tgcaggagagttgacagctcctccaagtcttcgactgatgtgtgcggatgaaccaacccacctctatttgaaaatgcacaataactcccca

SEQ ID NO: 921 - DNA, 91 bp, Parthenium argentatum
tgcaggctgacataacaatgaagttgtactttattttaatatgaaacaacatttaacatcaaccgaatgcatctatatataccttcctcta

SEQ ID NO: 922 - DNA, 91 bp, Parthenium argentatum
tgcaggttttctaagagcccaaaagaatggcaacccagataactctagacccaaagctaactcggccacctcgcttttgctcaccataacc

SEQ ID NO: 923 - DNA, 91 bp, Parthenium argentatum; identical to SEQ ID NO: 922

SEQ ID NO: 924 - DNA, 91 bp, Parthenium argentatum
tgcaggttctttacccctgcacacttcagccaacaaccacctctctcctcgcttcttttgttcccttttctttctcacagcagctatggac

SEQ ID NO: 925 - DNA, 91 bp, Parthenium argentatum
tgcaggtgatcaaatacatttaaatttcctagtctttatgtcaaccttttgaatccttacgttcatttccttcacaagtttttattttctt

SEQ ID NO: 926 - DNA, 91 bp, Parthenium argentatum; identical to SEQ ID NO: 925

SEQ ID NO: 927 - DNA, 91 bp, Parthenium argentatum
tgcaggcacatttttttaatttataaattaagggtatgttaattaaagacaggatatttaaaagtaacttttaaatattacaagggactgt

SEQ ID NO: 928 - DNA, 91 bp, Parthenium argentatum
tgcaggtacatcttttttacaatgttttagtagcactgacttgagaatgttttcttctttatgtcataatcttttctgggtcccacagctg

SEQ ID NO: 929 - DNA, 91 bp, Parthenium argentatum
tgcagggggtggcagcaacagcaacagcaacaacaccaccagtagcacaaccacctcatccgatgaggagaccctcgaagaagctagaaga

SEQ ID NO: 930 - DNA, 91 bp, Parthenium argentatum
tgcaggaagtcaaaatcatgtgtgaaagtgtgaaacaggcatttaagcttaaaaaattgcattttctgataccgaggaatttgagattgtt

SEQ ID NO: 931 - DNA, 91 bp, Parthenium argentatum; identical to SEQ ID NO: 930

SEQ ID NO: 932 - DNA, 91 bp, Parthenium argentatum
tgcaggaccgtcaatagacggaatggatcaacaaagcttgcaatcttctccaaccagctcagctgtcactgccatgagtggcaggagctcc

SEQ ID NO: 933 - DNA, 91 bp, Parthenium argentatum
tgcaggctttctattagttaaatgaagtttatcaagtagtattatgtggtgtgtttttgcttttactatgtcaatggtgattaccatgata

SEQ ID NO: 934 - DNA, 91 bp, Parthenium argentatum; identical to SEQ ID NO: 933

SEQ ID NO: 935 - DNA, 91 bp, Parthenium argentatum; identical to SEQ ID NO: 933

SEQ ID NO: 936 - DNA, 91 bp, Parthenium argentatum
tgcaggcatgtggtctgaagaatattaagatgttactgaggatgttggttgtggtttatgaactcgtggtgtagcggcacatatcagaaac

SEQ ID NO: 937 - DNA, 91 bp, Parthenium argentatum; identical to SEQ ID NO: 936

SEQ ID NO: 938 - DNA, 91 bp, Parthenium argentatum
tgcaggctgcaacctaaattcacacttgacactttaatctttctttcatttatgtatgtcaacattggtttttgtcaaaatggaactaagc

SEQ ID NO: 939 - DNA, 91 bp, Parthenium argentatum
tgcaggggctggtggaacgccatgaagagtaaattcatcaagtaagatgttgtctttcacattactacactcaccctgatgcacatcaacg

SEQ ID NO: 940 - DNA, 91 bp, Parthenium argentatum
tgcaggtccagcagcagcatctaacaagtatagagggaaaatattactattttatgaaatgaaaaaataatcaaagctcaattttggaagt

SEQ ID NO: 941 - DNA, 91 bp, Parthenium argentatum
tgcaggactgaatcagaaatcgtaaatgaaatcttgacgagaatcttgcaggacacgcaagatgcatcaccggtagatcttagtcatctta

SEQ ID NO: 942 - DNA, 91 bp, Parthenium argentatum
tgcaggttatctcctgaagtgataccggttctgatgtttaataaaactcgttttaacaaaagtcgtttcgagagttgagatcataagctca

SEQ ID NO: 943 - DNA, 91 bp, Parthenium argentatum
tgcaggtagaccattttgccctcacaattgtgccaaaaccgcgtaacattgtaaaatgaccgctttaccctcacaagtttatacattttat

SEQ ID NO: 944 - DNA, 91 bp, Parthenium argentatum
tgcagggttgatcacatcagtaatagacgattgcatcacaattgttctcgagtacaacttccacggccttccaagatacgttggaaaactg

SEQ ID NO: 945 - DNA, 91 bp, Parthenium argentatum; identical to SEQ ID NO: 944

SEQ ID NO: 946 - DNA, 91 bp, Parthenium argentatum
tgcaggctgcagcatgtgtcattgtttaactattatattactttaaagtttttactttgcttatagcttttgtttacttaaggttattggt

SEQ ID NO: 947 - DNA, 91 bp, Parthenium argentatum
tgcaggacaagaaaaatatttaccaatagaaactaaaaacatacattatgtaatgactataatcaaatattcaaataacaaccaattataa

SEQ ID NO: 948 - DNA, 91 bp, Parthenium argentatum
tgcaggtagaaaaactcatcaaatataatcctcttccgagctaaatcagcctcactaaaatttgttggctggtgaatcccaatatatgcct

SEQ ID NO: 949 - DNA, 91 bp, Parthenium argentatum
tgcaggctgcacctcatgtataagtataatataacttggtcaaccgttttaccgattgaaatcaagatttgtattagatatggaagtgatg

SEQ ID NO: 950 - DNA, 91 bp, Parthenium argentatum
tgcaggtggtgtcaacatcgtcgtacttttagcttgcatagttgtacagccagtgacatgagtttgacctggagagactgcagctgcaggt

SEQ ID NO: 951 - DNA, 91 bp, Parthenium argentatum; identical to SEQ ID NO: 950

SEQ ID NO: 952 - DNA, 91 bp, Parthenium argentatum
tgcaggcgggttgccaccaatgttaaaccgcacctctagtaaggcaacatctgctcaaaagggaccgccagctggaggggcgccaaaaatg

SEQ ID NO: 953 - DNA, 91 bp, Parthenium argentatum
tgcaggatttaatccgcatggcgcgggccagtgggcttaatgaccccgcgtgcaatggtgtttcccattcaaacaactaatattcccaccg

SEQ ID NO: 954 - DNA, 91 bp, Parthenium argentatum
tgcaggaagtttaagccacatctcataggtttgggtccaaattgaattaacaaatgggcatattaataaaacatggtctgacgtctcctcc

SEQ ID NO: 955 - DNA, 91 bp, Parthenium argentatum
tgcaggttcacaacaaggatgaatggaagttttttcccagcttccgactgtgacacaaaaaatggacttagcataaccaacagaattacgg

SEQ ID NO: 956 - DNA, 91 bp, Parthenium argentatum
tgcaggtttgtatttttcatttaatcttatttattgagatgtcaagcttggcatccaccccctctgtgctcgatctttatctacttattac

SEQ ID NO: 957 - DNA, 91 bp, Parthenium argentatum
tgcaggcacgcagttacaaggtgttacaccacattgatggcactgaaccgcctgccaaaacagatcctgactacgctaactgggccaaaat

SEQ ID NO: 958 - DNA, 91 bp, Parthenium argentatum
tgcaggtgtacctaatatgttaccgactcattcctaagaacgcttactcatttcgttaaatcttttgtgtattttatcactaatataatgt

SEQ ID NO: 959 - DNA, 91 bp, Parthenium argentatum
tgcagggttttttccaacatatatagttgttttgtcgcaaatgcgtaggaaatccatgtttgcaatgtatttctcacgaaaaaagtgagtc

SEQ ID NO: 960 - DNA, 91 bp, Parthenium argentatum
tgcaggatcgattgagtctttcatagaggtacagcagagaatggggcgtttggttagatcatgcaactttaaatcaactccacatgttgat

SEQ ID NO: 961 - DNA, 91 bp, Parthenium argentatum
tgcaggcttcactatcttcataatttccacaccatttaaaatctcgttcttcctcacaactagtactcaaatccgacaggccaactccccg

SEQ ID NO: 962 - DNA, 91 bp, Parthenium argentatum; identical to SEQ ID NO: 961

SEQ ID NO: 963 - DNA, 91 bp, Parthenium argentatum; identical to SEQ ID NO: 961

SEQ ID NO: 964 - DNA, 91 bp, Parthenium argentatum
tgcaggagagtatatgagatccttatagaaaaagtaaaaggcacttagttcatgcaacactcatatttcgaataatcaattatttgaaagt

SEQ ID NO: 965 - DNA, 91 bp, Parthenium argentatum
tgcaggtaaagacataacatttgtaacagagaaacaaacaaacacggaggttgatgacgggagcttgagaacccatatttatttctacagc

SEQ ID NO: 966 - DNA, 91 bp, Parthenium argentatum
tgcaggaaatccgtatttcccctaatttaggcattcgcatatggccataaacactctcgatttcactctattccaacattcaaaagataca

SEQ ID NO: 967 - DNA, 91 bp, Parthenium argentatum
tgcaggtgggactaaaggatcgggtttgttttcgtcgccgggtagcagtccgaataaaaatatgctgcggttcaagacggatagctcgggt

SEQ ID NO: 968 - DNA, 91 bp, Parthenium argentatum
tgcaggatctccaagtaaacgagtgtcaagaaccttggagagggtactactgtcgtctcctaagcacgagtcaatggctagttttgggagt

SEQ ID NO: 969 - DNA, 91 bp, Parthenium argentatum
tgcaggcacttatatattcatcatttgaatgccacaagtaattagtgtattaaataagaatacaaaactatatttttgaaataaagggtaa

SEQ ID NO: 970 - DNA, 91 bp, Parthenium argentatum
tgcagggttctttgtgaagcgagatgcaaaagggacaaataatcggtcgtataatgcaagggtaacaaggatggataggacatcaaaaact

SEQ ID NO: 971 - DNA, 91 bp, Parthenium argentatum; identical to SEQ ID NO: 970

SEQ ID NO: 972 - DNA, 91 bp, Parthenium argentatum
tgcaggttttgcccggtggagatttcctaagagggacacaccatttgattgggctattggatattgggcttgtagctggatgatgggcgac

SEQ ID NO: 973 - DNA, 91 bp, Parthenium argentatum
tgcaggcgagctagacggtggacggatatctttcgcaatatgggggcgaaaagtatgtttttcaattccattctttgcttggtttatttac

SEQ ID NO: 974 - DNA, 91 bp, Parthenium argentatum
tgcaggttatagatgggttccatacactatgatttaaaactgttttcaacatgttatgcctgattcaaacagttcaaaacccaaaaaatct

SEQ ID NO: 975 - DNA, 91 bp, Parthenium argentatum
tgcaggaaatccgtatttgctgataaggctcgtataaaagcataatgtcacttgaggtcggagtcctcaaatatcgtcgtccatacagatc

SEQ ID NO: 976 - DNA, 91 bp, Parthenium argentatum
tgcaggatcatacaaaccaagaccaatttctgatattacatgatttactatttagcacagaaaaggttgactcaagaaaaagatgatttct

SEQ ID NO: 977 - DNA, 91 bp, Parthenium argentatum
tgcaggtaattaaaacaacaatgatgcgataaaaacttaaatatttcgtacttataggcaaaaaatgatcattgagttcttattgcttgca

SEQ ID NO: 978 - DNA, 91 bp, Parthenium argentatum
tgcaggcacatgtgatgtgtaaaaggtgtctgtgctgctgtaccgactcccctaccccaagatctagaattttataaacttcactcatcac

SEQ ID NO: 979 - DNA, 91 bp, Parthenium argentatum; identical to SEQ ID NO: 978

SEQ ID NO: 980 - DNA, 91 bp, Parthenium argentatum
tgcaggacacctcatatttattaaatatatactatattaactaacaaaactaattaatatcctattaagaagcaagacaaaccatatctgg

SEQ ID NO: 981 - DNA, 91 bp, Parthenium argentatum
tgcaggcccatgtggtggaaatttgtatttgaagtctggcactgaccgacgcaactccatggaccatgatgctgtatgattctttgaacct

SEQ ID NO: 982 - DNA, 91 bp, Parthenium argentatum
tgcaggtttctcaattctaaaagacccacatatttcatgccacatgccatcattaacctcaacttctccagcattcaaccactggtcgtcc

SEQ ID NO: 983 - DNA, 91 bp, Parthenium argentatum
tgcaggcatctggtgacagtttcctgcaatccattagcctgcagattcgtttcttttcgctctttcctatcccgggacgttcctgtaaata

SEQ ID NO: 984 - DNA, 91 bp, Parthenium argentatum; identical to SEQ ID NO: 983

SEQ ID NO: 985 - DNA, 91 bp, Parthenium argentatum
tgcaggagtaggattctcatactctaacaaatcctcagactatcaaaaaatgggtgacaaatcaacagcggcagacaattatgtgttcttg

SEQ ID NO: 986 - DNA, 91 bp, Parthenium argentatum
tgcaggtcttttaatttgtactattaaaaaagaaagttttttttttaaacttctgtaaaatggggatatgaagttaacgatcaaatttgat

SEQ ID NO: 987 - DNA, 91 bp, Parthenium argentatum; identical to SEQ ID NO: 986

SEQ ID NO: 988 - DNA, 91 bp, Parthenium argentatum
tgcaggcagttggagtcacaggttgctgcagaaccacaattaccatcatttccttctttgactagcctagggagaaggtctttaaagtata

SEQ ID NO: 989 - DNA, 91 bp, Parthenium argentatum
tgcaggcataattttaccggttcccacaagagtgattggaaccactggaactccagttttcgcagcaatactgaatgcacctttctacaaa

SEQ ID NO: 990 - DNA, 91 bp, Parthenium argentatum
tgcaggtgtttatgagcttataccttattataagggtgagaatacagtttttgatgtttcccctccctttgtcactgtgactgttcagcat

SEQ ID NO: 991 - DNA, 91 bp, Parthenium argentatum
tgcaggcatcacatgtttacagcggatgggtgttgggttcgctataaacatttgtgcaacattggtggggtcgtttgtagaaatcaaaaga

SEQ ID NO: 992 - DNA, 91 bp, Parthenium argentatum; identical to SEQ ID NO: 991

SEQ ID NO: 993 - DNA, 91 bp, Parthenium argentatum
tgcaggcgctctgtgtgtgtgtgagagagttaggcaagaagataaagggttacaaacttacacagagtaatcaaatagggcttattgagag

SEQ ID NO: 994 - DNA, 91 bp, Parthenium argentatum
tgcaggcacacccaaccactccagcgcaaagttcagttataaacacaataacttataaataatgagtaaattccacaaaatcaacaccgcc

SEQ ID NO: 995 - DNA, 91 bp, Parthenium argentatum
tgcaggtcctccacacggcttttcgccctatccttgaacacctggtgggacccagacttgcattttgtacctttccccattaaaaacaaca

SEQ ID NO: 996 - DNA, 91 bp, Parthenium argentatum
tgcaggtatggtcaggtatggaaccgggtacacgatacccagtttcagtttttttgggtccgctcataccccgtttttttgtgcacctcta

SEQ ID NO: 997 - DNA, 91 bp, Parthenium argentatum; identical to SEQ ID NO: 996

SEQ ID NO: 998 - DNA, 91 bp, Parthenium argentatum; identical to SEQ ID NO: 996

SEQ ID NO: 999 - DNA, 91 bp, Parthenium argentatum
tgcaggtaggaataacctcgtcttctgcatctctagtccacaacgaccactccagctgtacggctgagatcggatgaacagcatgcgctct

SEQ ID NO: 1000 - DNA, 91 bp, Parthenium argentatum
tgcaggttaaacaaagtgaatttataaaaacattttcaaaccagcattatgggcgatatctcttaactactgttaataaagaaatattaca

SEQ ID NO: 1001 - DNA, 91 bp, Parthenium argentatum; identical to SEQ ID NO: 1000

SEQ ID NO: 1002 - DNA, 91 bp, Parthenium argentatum
tgcagggagatattatggatgaaatatgatccaagggctaaaaagtggctcctgttaatggttctcatttgaacctccctcttgtttgtat

SEQ ID NO: 1003 - DNA, 91 bp, Parthenium argentatum; identical to SEQ ID NO: 1002

SEQ ID NO: 1004 - DNA, 91 bp, Parthenium argentatum
tgcaggtccggagaggattgctaggcatgtctggtaatgaaagtagccttgctacaattcttggtgcaaaatttgcagcggcgtttgttgc

SEQ ID NO: 1005 - DNA, 91 bp, Parthenium argentatum
tgcaggaatgaaggttctatattatatccttgcactatttgtctgataactagaattaccaacatagaagcattgaagtaatcatcaagaa

SEQ ID NO: 1006 - DNA, 91 bp, Parthenium argentatum; identical to SEQ ID NO: 1005

SEQ ID NO: 1007 - DNA, 91 bp, Parthenium argentatum
tgcaggtacagaaccattagatgacaagacatttaatccaggtgaagaggacataggtgcctgcaaattggacgttcctgcaacaggggtg

SEQ ID NO: 1008 - DNA, 91 bp, Parthenium argentatum
tgcaggtagattatgatattctcaagactaataacaaatccagataatatataagtatatatgtaaaaaggtacttttaagtgtgaataaa

SEQ ID NO: 1009 - DNA, 91 bp, Parthenium argentatum
tgcaggaggtaagctcctggatatgttcatatgtcatatttcttgaaatcctactatccttttttttttatttattttttatttttttata

SEQ ID NO: 1010 - DNA, 91 bp, Parthenium argentatum; identical to SEQ ID NO: 1009

SEQ ID NO: 1011 - DNA, 91 bp, Parthenium argentatum
tgcaggaagatcttattgctcccttagaacagcttgtcaatctcttcttgaccaacaaggtcagtacattcatgtttttgaaaaccctaaa

SEQ ID NO: 1012 - DNA, 91 bp, Parthenium argentatum
tgcagggaaaccgcgttataaacaatgaaaacaaaatctctatcttccatattctaagtgctcaatttcattataattataaaaatggtta

SEQ ID NO: 1013 - DNA, 91 bp, Parthenium argentatum; identical to SEQ ID NO: 1012

SEQ ID NO: 1014 - DNA, 91 bp, Parthenium argentatum
tgcaggacaggttaggctacttgtcaaggatattttgattttgttatcaagaagctaagtatctactgtcatggcaaactaagacgttaag

SEQ ID NO: 1015 - DNA, 91 bp, Parthenium argentatum
tgcaggaactttgactttttcgcgtagtaacatgtgtggtatgacatcacgttttaaccacataaaaatttgttaaaagataaatggagat

SEQ ID NO: 1016 - DNA, 91 bp, Parthenium argentatum; identical to SEQ ID NO: 1015

SEQ ID NO: 1017 - DNA, 91 bp, Parthenium argentatum; identical to SEQ ID NO: 1015

SEQ ID NO: 1018 - DNA, 91 bp, Parthenium argentatum
tgcaggcacagcataacttgatcaaagaagttaaaatagaatcaatccacacctttgtttctctaaaaccgttgaaacttcaaacgtgcat

SEQ ID NO: 1019 - DNA, 91 bp, Parthenium argentatum; identical to SEQ ID NO: 1018

SEQ ID NO: 1020 - DNA, 91 bp, Parthenium argentatum
tgcaggcccaggcccattgcatcaacggtctttaaattcacaagtttcatacttaactgggcttctctcactatgtctgtgtaatttcctg

SEQ ID NO: 1021 - DNA, 91 bp, Parthenium argentatum
tgcaggatcaagatagtttagaatcagaatcatacaagatcaagaactaccctgtatgacagacattgtcctgatacgacaattacttttt

SEQ ID NO: 1022 - DNA, 91 bp, Parthenium argentatum
tgcaggaggaaagaaaagaaaacaatcggatgtgccgaattccaaagccccaattgatgacaaacgggctaaaaaattacccgagcagcct

SEQ ID NO: 1023 - DNA, 91 bp, Parthenium argentatum; identical to SEQ ID NO: 1022

SEQ ID NO: 1024 - DNA, 91 bp, Parthenium argentatum
tgcaggttgcttgggacaccaactgaagagcagtggccaggggtgaggtctctaaacaactggcatgcctatccaaggtgggtacctcaaa

SEQ ID NO: 1025 - DNA, 91 bp, Parthenium argentatum
tgcaggattgttttacattaaacacacttttgtttccctgggtttgtaaaatattatgaaattcctgatgtgacataattacactgcatgt

SEQ ID NO: 1026 - DNA, 91 bp, Parthenium argentatum; identical to SEQ ID NO: 1025

SEQ ID NO: 1027 - DNA, 91 bp, Parthenium argentatum
tgcaggcgcaaggggcgttgcctccttggaacccctgatgtatcttggtgtcggatgtcttattagttttgaacgagcatgtacgtaacac

SEQ ID NO: 1028 - DNA, 91 bp, Parthenium argentatum
tgcaggtttgaccatcttttgctcgaatttcttaatattcgtttattattaagtatgaacttttgttgtgaatacactagttacttaaatt

SEQ ID NO: 1029 - DNA, 91 bp, Parthenium argentatum
tgcaggcagccttaacttctggcagttaaaccatgaatctcctgtttcagcaagaactgcagtgttctcattgagcattttctgtatatgt

SEQ ID NO: 1030 - DNA, 91 bp, Parthenium argentatum
tgcaggtaatcatcgatccaaaaatgagtactgctttatatttttatattacatcttatcatatagctttacatgttgaacctgtattgca

SEQ ID NO: 1031 - DNA, 91 bp, Parthenium argentatum
tgcagggacaaagggaggatcgctctttcgcaatacatgaaaacaatcaacctgaaaagcaagatcaaagggttgactactgcatcaaatc

SEQ ID NO: 1032 - DNA, 91 bp, Parthenium argentatum
tgcaggctaccatcaagtctaaccagcttatcatccgttcacagaaacgtgaggaaaccacaactgctgacgcagcaatctctcgccgttt

SEQ ID NO: 1033 - DNA, 91 bp, Parthenium argentatum; identical to SEQ ID NO: 1032

SEQ ID NO: 1034 - DNA, 91 bp, Parthenium argentatum
tgcaggtatctgtttgagttttgatcacgtgatactgtcaacaattacaaaccattttatgaagcataaaattttctaaagaaaaggtcat

SEQ ID NO: 1035 - DNA, 91 bp, Parthenium argentatum
tgcaggaacatttgggtatattgatccgatgtaccaagagacaggggtactaacgaaagagtcagatgtctactcttttggcgtagtgttg

SEQ ID NO: 1036 - DNA, 91 bp, Parthenium argentatum; identical to SEQ ID NO: 1035

SEQ ID NO: 1037 - DNA, 91 bp, Parthenium argentatum; identical to SEQ ID NO: 1035

SEQ ID NO: 1038 - DNA, 91 bp, Parthenium argentatum
tgcaggagatcatataatgttctgagtgactactttgagaggaagttactttgtagccaacagttactttcagatgagagatatgagaata

SEQ ID NO: 1039 - DNA, 91 bp, Parthenium argentatum
tgcaggtggcctatcttagctcttcttgggcccacttaatcttttcctaggaccaaaactttttttttctttaggtattcaaagaatattc

SEQ ID NO: 1040 - DNA, 91 bp, Parthenium argentatum
tgcaggcaattggggacggtgtcgcccttatgggggtggttcaaatggtgatttttggagacggtgttgcccttacaggggcggttcaaat

SEQ ID NO: 1041 - DNA, 91 bp, Parthenium argentatum
tgcaggccagatcattagacaattaggcaattatgttatttaagaaacatcatacaaattgaagtgaacagagggacaatcaacctgaaca

SEQ ID NO: 1042 - DNA, 91 bp, Parthenium argentatum
tgcaggatcgctcactgtcttcttcgtgctcgccatattgcttacttgcgctgtttatgattgtttgatcatccccttttggaagaaatgg

SEQ ID NO: 1043 - DNA, 91 bp, Parthenium argentatum
tgcaggtcaatattgttagtttacatctaacttccaactctttcatcaccagcttcactccaacatattcatcttttacagtccagaaatt

SEQ ID NO: 1044 - DNA, 91 bp, Parthenium argentatum
tgcaggaccgcggccaaagccaattcattttcataatcacctccagttacaaagaaatgcaagtcttgtatgaacttatacaccacaacat

SEQ ID NO: 1045 - DNA, 91 bp, Parthenium argentatum; identical to SEQ ID NO: 1044

SEQ ID NO: 1046 - DNA, 91 bp, Parthenium argentatum
tgcaggagagtaaaatgaattctttagccttcaacacatcaacccataccatgcctgataatgatgctggctgtgcaagtctagactgcca

SEQ ID NO: 1047 - DNA, 91 bp, Parthenium argentatum
tgcaggcgattttagtttacttattggtgactggtacaagtccaaccataaggtgaggatcatgttcaaagtcatagtcaaattaatctta

SEQ ID NO: 1048 - DNA, 91 bp, Parthenium argentatum; identical to SEQ ID NO: 1047

SEQ ID NO: 1049 - DNA, 91 bp, Parthenium argentatum
tgcaggtttgatttcaataacttgtaagtacagtattcaagaaatacatatatgtatatatgatttagtttgtgcataatatatgctttac

SEQ ID NO: 1050 - DNA, 91 bp, Parthenium argentatum
tgcaggaacaagggcccatcccaatcgctcattcacgtgtaggttttatggacgccagcctaagaataatgtcaacctggctactaatttc

SEQ ID NO: 1051 - DNA, 91 bp, Parthenium argentatum; identical to SEQ ID NO: 1050

SEQ ID NO: 1052 - DNA, 91 bp, Parthenium argentatum
tgcaggacataaagaaagagttgcaattttcaaggggcgtgccaaaaaaattatatctgaaaacttgatttatactgaaaacttaacaact

SEQ ID NO: 1053 - DNA, 91 bp, Parthenium argentatum; identical to SEQ ID NO: 1052

SEQ ID NO: 1054 - DNA, 91 bp, Parthenium argentatum
tgcaggctcatttgaacacatagataatagcgcaaaataaaacgggtcaaaagtagccaaacatatactctttaagtgtttacaaattcat

SEQ ID NO: 1055 - DNA, 91 bp, Parthenium argentatum
tgcaggttgtgaatggtaggaatgtgaaatgatattaattaagtcgttagaattgtgttttttcttatgcatggctatttaagtcagcctc

SEQ ID NO: 1056 - DNA, 91 bp, Parthenium argentatum
tgcaggtcaaacgaaatctttaaacaaaatggggtttgaagcataaaacagaaatcaaaccggagttggttacctttctacgcaactagaa

SEQ ID NO: 1057 - DNA, 91 bp, Parthenium argentatum; identical to SEQ ID NO: 1056

SEQ ID NO: 1058 - DNA, 91 bp, Parthenium argentatum
tgcaggatctgtacatatctcaaacgaagaaccaatcatttaaacatataatcattctaaataaaaacagatatttgagagatttgttgca

SEQ ID NO: 1059 - DNA, 91 bp, Parthenium argentatum
tgcaggctaccatcaagcctaaccagcttatcatccgttcacagaaacgtgaggaaaccacaactgctgacgcagcaatctctcgccgttt

SEQ ID NO: 1060 - DNA, 91 bp, Parthenium argentatum
tgcaggtaggggtcctctataccaaggaccaggaggtgcattcattggtgggccgcgccaggcatcataatgttgagggggaacattggag

SEQ ID NO: 1061 - DNA, 91 bp, Parthenium argentatum
tgcaggaaaaattcacatttttcggtcacatttacacctttttaaagcataaacaagaaaataaaaaacggagtcaaacaaaaatatgtta

SEQ ID NO: 1062 - DNA, 91 bp, Parthenium argentatum; identical to SEQ ID NO: 1061

SEQ ID NO: 1063 - DNA, 91 bp, Parthenium argentatum; identical to SEQ ID NO: 1061

SEQ ID NO: 1064 - DNA, 91 bp, Parthenium argentatum
tgcaggtaaagtgatggtctacgttcaaggtcctgctccaggaatcggttttatggttaccagatttcaaatcgttgctgttgatcaccag

SEQ ID NO: 1065 - DNA, 91 bp, Parthenium argentatum
tgcaggattattattagttattattgtttgttcttattgaaaaaagtgttttatttgaataaattgtaggttccagcatccaaaatcagcc

SEQ ID NO: 1066 - DNA, 91 bp, Parthenium argentatum
tgcaggaagttcattcaaatcgcaaccttgcaaaggtagttctatatctttcaatggctttgagctcccgccaccctctgtctgcacaggt

SEQ ID NO: 1067 - DNA, 91 bp, Parthenium argentatum; identical to SEQ ID NO: 1066

SEQ ID NO: 1068 - DNA, 91 bp, Parthenium argentatum
tgcaggtatggtcaggtatggaaccgggtacacgatacccagtttcagttttttttgggtccgatcataccccgttttttgtgcacctcta

SEQ ID NO: 1069 - DNA, 91 bp, Parthenium argentatum
tgcaggctagtcatcgtgtagaatctgatgaaagaagacctctacttcctacttgaattgaccagggtaagtttctataattactatgttg

SEQ ID NO: 1070 - DNA, 91 bp, Parthenium argentatum
tgcaggctgcaggcttaccatttactattctaatttcattttataaatgacatgtttcacagtttattggatttcttgaaccgtatatgga

SEQ ID NO: 1071 - DNA, 91 bp, Parthenium argentatum
tgcaggtccggagaggattgctaagcatgtctggtaatgaaagtagccttgctaaaattcttggtgcaaactttgcagcggggtttgttgc

SEQ ID NO: 1072 - DNA, 91 bp, Parthenium argentatum
tgcaggtactattaccggagttgctaacgcggaagctgtcaagttgtcagattaatgtcatgtccactttccttttttaacgatgctttaa

SEQ ID NO: 1073 - DNA, 91 bp, Parthenium argentatum; identical to SEQ ID NO: 1072

SEQ ID NO: 1074 - DNA, 161 bp, Parthenium argentatum; identical to SEQ ID NO: 1

SEQ ID NO: 1075 - DNA, 161 bp, Parthenium argentatum; identical to SEQ ID NO: 2

SEQ ID NO: 1076 - DNA, 161 bp, Parthenium argentatum; identical to SEQ ID NO: 3

SEQ ID NO: 1077 - DNA, 161 bp, Parthenium argentatum; identical to SEQ ID NO: 4

SEQ ID NO: 1078 - DNA, 161 bp, Parthenium argentatum; identical to SEQ ID NO: 5

SEQ ID NO: 1079 - DNA, 161 bp, Parthenium argentatum; identical to SEQ ID NO: 6

SEQ ID NO: 1080 - DNA, 161 bp, Parthenium argentatum; identical to SEQ ID NO: 7

SEQ ID NO: 1081 - DNA, 161 bp, Parthenium argentatum; identical to SEQ ID NO: 8

SEQ ID NO: 1082 - DNA, 161 bp, Parthenium argentatum
caaaaaccgttatctgcaagggaggatgcatcaaagatcagcattcgagcatgtacatgtgttgccaacattgcaaacagwacaaaagatctcattgataaagaattatcagcgttttcgtgttgtcctgataataggctttacatgcttccatccactcc

SEQ ID NO: 1083 - DNA, 161 bp, Parthenium argentatum
tatcaattatgtccaaaataatgactcttgtatagattgagtttgcttctacacttttaatacatttaatgctgatttcakattttcaacttgatgtaaaaggctttcaagatgtccatgcttctttaaacaaatatcttgcacaagaagagttcattatt

SEQ ID NO: 1084 - DNA, 161 bp, Parthenium argentatum
aatatatatttatgaaaaatggacaaaagtgtttgtagttgactgaattagacttctaccaaatgataaaaatcttgcagytatacagtgactacatgaaaagcttcagagagaacatggctgagtttttggatgcagaactgtttacagatatcgaggtc

SEQ ID NO: 1085 - DNA, 161 bp, Parthenium argentatum
ggacgtcttttgtgctgggagccggttggagggtacctacagggaccacattgtcccaatgagatgacggggtcctactgwacgtgggggacccaccaggtggacggcgaagtggcactacaagttcatccatcgcaagatcccaaagtaaaagttgtgta

SEQ ID NO: 1086 - DNA, 161 bp, Parthenium argentatum
ttggttcattttttgtaaaggtaaggaaaatattacttccaaccaccattcatcagttaaatgcaactttttttttttttkctttatttgaaatctgatagttttccatgctcaactttgcagtcaaaattgagtcctgatgcaggccatattcttggtgg

SEQ ID NO: 1087 - DNA, 161 bp, Parthenium argentatum
catatctaatttatttcaataaaccaattgtgatggttgaaaacatctgaatatattgatctcttcatttgtatcttcagktttttagtgatcagattcaaaatctctatacatttatactgacccgtaatcaaaaaggtctcataaaggttatagctagt

SEQ ID NO: 1088 - DNA, 161 bp, Parthenium argentatum
atggacgcagggttattgagcgaagcaagttcttctagaagctcgcgttcttggtcactaacacaaccaatatcagcacakttaaaatacagagtgattaggaacaactcattgtacacatttccatctaaactttacaaaataataataataataataat

SEQ ID NO: 1089 - DNA, 161 bp, Parthenium argentatum
tgttcaatgcgtatagacatagtgtagtaattgaattatacagttctcttcttaggttaattgcatgagaaaccgattctwgttatgcacactaggtgttagatgaaatgcctcactgggatttgtatgatttttttacaggaaatctaaaatcgtcctca

SEQ ID NO: 1090 - DNA, 161 bp, Parthenium argentatum
atgatgggtggaatgaaattttaaagattcagaagtttcgtagagcagtgggaaaaacaatattcttttcgttctcggctmtcattagctatgcatacaacaacaacacgtacgtatactgttatgagtctgctttctaagtaaatttgttattccttgaa

SEQ ID NO: 1091 - DNA, 161 bp, Parthenium argentatum
cggacattatttctgtatttagacttttatcgatcgacgtctatgttttttaacttttccggctcatcttcctccgaagcwttcatccgagtagtcactacgccctaccctatcgctgagtctttggaagcggtttcactcctttatagttaccataattc

SEQ ID NO: 1092 - DNA, 161 bp, Parthenium argentatum
tggatttgtaattggaaactcattataatcttaggggcatagagaaataaacacatactcatgattcatagaagaacacamgggatttgcaacaaatccgaaaaacataaacctgaacagcacggtctctgtcggtttcatacacagtcacacgtaaacct

SEQ ID NO: 1093 - DNA, 161 bp, Parthenium argentatum
ggaatctgtgtcaaaggagggaatctccagactttgattctcaacaacaaccttatcacaggaacaatccccaagtcgatygccagctgcacgaatctgatgtgggtttcgctttcgaacaacaaactcgaaggcgagatccctgaaggcattgggaatct

SEQ ID NO: 1094 - DNA, 161 bp, Parthenium argentatum
gttacccaacctgatcgacctgctttactaaaaggaatgtggaaaactctcacctgaaacacactagaactcgaagaagaytctccatgttttgtatatccaaacccgcagcctttgcataatcttacaagtatatttgttacaggaatccatgatcggtt

SEQ ID NO: 1095 - DNA, 161 bp, Parthenium argentatum
catgatcggttatcaaatgctgataaaagtgatgttggcaggctaagagttgctgcttggttgctctcaaaagcagccaaraactccttgtactgaactaatacagaaattgattgcagaagtagatctcttagttctgcacttgatattctcgggtcgct

SEQ ID NO: 1096 - DNA, 161 bp, Parthenium argentatum
atcaccaatttcatgtcagtcttcattgccatgatattatttcgtttgagtttggtcccaatacgatcattaggtgggccyccttataaatatttgtccatattatattactttgaaaataataatttttttacatagcatttagctttaaaaaaatacga

SEQ ID NO: 1097 - DNA, 161 bp, Parthenium argentatum
caaacataagtacacacacatacacatatatacatcagaacacacataaaaacacacatatcaatatacacacacaagcasatggatacatacctacaactcagaatgcacagatatgcatatcagcatatttcatattcgggtctaggggttctaaccta

SEQ ID NO: 1098 - DNA, 161 bp, Parthenium argentatum
attgcagatagtgaggtttatttatttgtttgttgttgcattttatttattttatttggtttatgaatgaaaattcgtctkttaagggtttatggaaattcgtaaatgaccaacagtattgtatttattttatcataaagaatttaatttttttttatttt

SEQ ID NO: 1099 - DNA, 161 bp, Parthenium argentatum
ggaccaagtctgcaccaagaatagctcgcacagacgttttttaatgagacgtattagagaaaacaaacagtctacagatgrcaatgtatgcgcgtggtctgcgcggcgcagacataagagcctgagcaaacattttttaaaaaaacaaacaccaccgtaat

SEQ ID NO: 1100 - DNA, 161 bp, Parthenium argentatum
ggagacaaataaatcccggctccataaacaagttgttttaacgattcttgacttggagaaacattgcccggtaacaaatcrgctgatgcaatcgatccttcagaaagatcataaaccgaaaccattttcccatatgttacaacaccgattcttgttgtggg

SEQ ID NO: 1101 - DNA, 161 bp, Parthenium argentatum
agaaacattgcccggtaacaaatcggctgatgcaatcgatccttcagaaagatcataaaccgaaaccattttcccatatgytacaacaccgattcttgttgtgggtggaagtgaatccacaaatgcatgtaaagaactctgcagatgttgaagatgcggtt

SEQ ID NO: 1102 - DNA, 161 bp, Parthenium argentatum
aaaaattagttccataaagggtgaaattcaaattttgacgataaagacagacagacatacgtgtagcacaggttatttgtyagtgactgcagagcatccgcttggaacttgttctcatcccagagcacatggtaatgggctgggcggctagtaccctgttc

SEQ ID NO: 1103 - DNA, 161 bp, Parthenium argentatum
caggtcggcaggttaattgggttgtaaatgggttggtcaggtaaaagggttgcacttattatttatattttgttctacatyttaaacgagagggagttcaaatcctttatccacaacccaacctacgacctgtctatcataccaggcttggcggtgtcatg

SEQ ID NO: 1104 - DNA, 161 bp, Parthenium argentatum
cctatgaaaacatcaacaattttaagtttttaactttaaatatgtagttacatagaaacagttagccctatattctaccayatatgcaaatgaatatgtaatttgaaaattaccatagacatttatcagatggggcagaccctgagtaaaaggttgaaaga

SEQ ID NO: 1105 - DNA, 161 bp, Parthenium argentatum
ctcatgacacggtagaattggccagatgtattgaaaaaaccatggtgtctgcggtagccgtccatggaaggtaataatgtwatatataatattattcatgtgataaacttttcttttaatttttacagtttggtaatatatttttatatattttgttaagt

SEQ ID NO: 1106 - DNA, 161 bp, Parthenium argentatum
tgtgataaacttttcttttaatttttacagtttggtaatatatttttatatattttgttaagtgaatcgcagaagagttgyggatagaccaagagatcctgctaattggagtgaaatcgcaagtgttgtagatgctcttgctatacccgtcattgccaatg

SEQ ID NO: 1107 - DNA, 161 bp, Parthenium argentatum
ctgtatatgatggcaggagccatagtcatcactcatcacctaccatacttcataattttatttttaatttatttaatcatraagtagtaatattataagaccacacatatcttcatcccacagttgctgtcacagtcaacaaagcacaccacctccaccac

SEQ ID NO: 1108 - DNA, 161 bp, Parthenium argentatum
ttaattatctggtattttatttatcaagttctattaaattatttgtaaaaacctacaactatacgagttttagtgagtttkctatttatttattatttttctctgtcttttaaagaatttatgttgttatttattatttattttatttgttttaaaaaaat

SEQ ID NO: 1109 - DNA, 161 bp, Parthenium argentatum
cttcatgcaaattgtgccattttgttggcttgttatgtatgtgtaatttgtttctcgaaaactaagtttggtataaatgtrtgatatattctttttactatattctcctaaaacgcatgcttactctttgtagcatttgcattattttaccatgtatttcc

SEQ ID NO: 1110 - DNA, 161 bp, Parthenium argentatum
acttgcatactttcttaaaatggtttgtaatttttgtcatcattatgtttaaaatagttaaaactgagaaaaaaaagtacyattagcaggcatacccgagctttcatcattattagattttttactagtagtacataccctgattttttttttctttttga

SEQ ID NO: 1111 - DNA, 161 bp, Parthenium argentatum
gattttgttagaatgtattgatattttgacatttccatataaatcttataggaaccagatgcagctgtttcagtacttggkgaaatggatgcttggattattttgccctttttcttgcaaggaggccgtttcaccattgatgacgtgcattatgtagctga

SEQ ID NO: 1112 - DNA, 161 bp, Parthenium argentatum
ttggattattttgccctttttcttgcaaggaggccgtttcaccattgatgacgtgcattatgtagctgattctgataggtrctataaactgaaatatattgtttttaatcactcaattttagtaaagcaagagtactgatactttacaatcttccattctt

SEQ ID NO: 1113 - DNA, 161 bp, Parthenium argentatum
aatttcatcagacaaaacataaacgcagcccaaactagcacaagttcctagctacatattattatacattactacagtttycaacctattcccacggtcccttaaaagttgaaagaaaagggggaacgttaacctgcttgtgccaaaatgggtcgagtagg

SEQ ID NO: 1114 - DNA, 161 bp, Parthenium argentatum
tgacccaactcacctggagagaagtctcgagtggtgaagaggcagcgacctttgtctggaagtgtggaaactgataaaccmcggtcatgttgcagtagcctttgtaaatcttccatcgtcaaaaccagaaagctctagtctgcctagctggcgatacaatt

SEQ ID NO: 1115 - DNA, 161 bp, Parthenium argentatum
cttatgcgagtatcccaaacatataattttcgagttcgtcaggcagtttctcaagcctccgacagccttcaagctccaacyttttgagttcaaatgtagtaacagtcactgcatcatccaccagcagatcagtccatagatcagatccccatcatccacca

SEQ ID NO: 1116 - DNA, 161 bp, Parthenium argentatum
tgtgctaaatttcattatttgttaactttcaaagtcaaaactttgtttactgtaaaaatttacaccagcttagttttgttyaactttaatcatatatatatttttttctaatttaattatccattttcaataaagtaacccattcttatatcagtttcaaa

SEQ ID NO: 1117 - DNA, 161 bp, Parthenium argentatum
cacaatcagaagctctctctcatctattttacatatcaacctttttatcaagtaaaccgctcgtattttcctcatccttgrttgtttttatatatcaccctagtcttgaccaattttgagcgagatgtgcatgaggcgccaccttaaggttctgtggcgtt

SEQ ID NO: 1118 - DNA, 161 bp, Parthenium argentatum
ttgaaatttaacagttgtcttttattccagcttatttcaggttcggacaacggtttgctaaaactgtatgatattcagcawattccttcaacaaacaacggtgtttacccaagtggcgcctctgtttcctttgatgagtttgaccaattgacatctgtcca

SEQ ID NO: 1119 - DNA, 161 bp, Parthenium argentatum
tcatcgtttgattgatcttgctcttcatcctgaccaatgactatgaactcgtcatcccgattattattcaaagtcaaaacyggttcatcacttggcttccatttatcttccaattctttcctcaaagaaaatcctaattgccgctttgcagatcgccaaat

SEQ ID NO: 1120 - DNA, 161 bp, Parthenium argentatum
aagcgtaccataatgtgacccctaggtctcatgcgccaaactcaccgtctcatgcaccaaaccctcaacctcctatgccawtagtttccatctcttgggccatatggcgcaacacataggatcctaccctgtatatatgttacatatatacacatacacac

SEQ ID NO: 1121 - DNA, 161 bp, Parthenium argentatum
gcaccaaaccctcaacctcctatgccaatagtttccatctcttgggccatatggcgcaacacataggatcctaccctgtakatatgttacatatatacacatacacacacacacatacgcatttggcaactcatcgctagagtaccacgtggcgtttacgt

SEQ ID NO: 1122 - DNA, 161 bp, Parthenium argentatum
aatgtcatggtgtccagattctcaaaagaatatgctcgctttaaaggcaatgaatcacttgatagaccattgttgctggcwaaatgtgcatattgttccaccacatgggcctgtttttgagatccgggttcaggatggttatggtgcaagatggtccttaa

SEQ ID NO: 1123 - DNA, 161 bp, Parthenium argentatum
gtgcatattgttccaccacatgggcctgtttttgagatccgggttcaggatggttatggtgcaagatggtccttaaacccraccaaggtatgcatcatgcatgcacacacgattttaatgactcttggtttatctcttttgtaataatgtccgggctttct

SEQ ID NO: 1124 - DNA, 161 bp, Parthenium argentatum
tgtgaagcttgttgtatagctagaagtcggcaccagcaccacaaacacctaaacaatcaccacaaatatcgaaaagttgtyatcaacttcttccctacataaaatgcataagaaaattagtaatttggggaagtcaaaggtatgtgcatgcgtaaattaca

SEQ ID NO: 1125 - DNA, 161 bp, Parthenium argentatum
aaaattcggagggtcgggcgacccccttccccccaagaagctacgccaatgggccgatgagtctcttcaaatttcaacaayccctttgttttgttcgttcgatcagtgtgctgagcttaaagctgctgatatgaatatagttaattactaaaatagaccac

SEQ ID NO: 1126 - DNA, 161 bp, Parthenium argentatum
ataattatgcactcaaatttctaatatcttacatctatgacacctaaaagaataaaaaatagtaatgcgtcatcgggttgrgtcggtccctagtatcactagaatgttgaattacaaaccctttgatgtaggctcaagttgagtagcttccaaagaaaata

SEQ ID NO: 1127 - DNA, 161 bp, Parthenium argentatum
acagaataaaaggctaaattgattgtttatgatgcaacgacaccacctcagccgctatgccaggcacacatcgtattcctmaagttgttccttgctctcatgcctccactctttttgtttttttcttttattgtgccgacttcggtctgcctcttggacta

SEQ ID NO: 1128 - DNA, 161 bp, Parthenium argentatum
cccccataccgcccaccgccatcagtcaatcatctacttttctgaatcaattctccaaatcactttgtaagtttcttgtakccatcatatgtttgttgtcaattaacaaaaaaatatatgtcaatcgcatgcaactggaatgattaacaatattgacaaag

SEQ ID NO: 1129 - DNA, 161 bp, Parthenium argentatum
agttaaggaccaattaactctggatcatgcgtaatgcgagaaaactgcccaaaaacatatttgtgtgtaatgcaaggcggrcactcttttatgtttaaaagatatatgaggttataacttataagcatttaaatgcctttgttgttgcaacatgcctggtg

SEQ ID NO: 1130 - DNA, 161 bp, Parthenium argentatum
tgcaacatgcctggtgaggagtccagtagatcaccaagagcaactcttaactcaacaactgttagacaattgacagccatwttgttaggggtttctttaagctcacttcttttgtgagcggatgctagtgagctgatatagatttgaacaataagatcact

SEQ ID NO: 1131 - DNA, 161 bp, Parthenium argentatum
tcagctgacaagagcaagtttaaggtttgtaaatggtttctcttgttaaacacaaaactttgccgaatataatctaatttyaaagttataatgttgtataggtgtaggtgtaaggtttgacctatttactagtgaatcagttgattcacgttatttttatc

SEQ ID NO: 1132 - DNA, 161 bp, Parthenium argentatum
ataatctaattttaaagttataatgttgtataggtgtaggtgtaaggtttgacctatttactagtgaatcagttgattcaygttatttttatcgctagcaggtcaaaagttgctcgaagtgtaatattaaacctttactaaaaaaatatatattgttatta

SEQ ID NO: 1133 - DNA, 161 bp, Parthenium argentatum
ttttatacatgaaaaagatgagctgttcggagggaaccctaggaccgaaccatttgtacccagttcatgatttttttcgtwttctttgattccagcattcaggtgcctgttggggaagagggttatgaaaaaattcgcattttgacaacatttacagcgaa

SEQ ID NO: 1134 - DNA, 161 bp, Parthenium argentatum
taaacaataaacaaagtaggggtgggcaaagtttggttaaaatcacatgatctaaaacatgctaacttcagattttggttratttttagattcggttaggttcattataccgaacttgaagagagaaagaaatgggttaataatcgtcatatgtattacat

SEQ ID NO: 1135 - DNA, 161 bp, Parthenium argentatum
aaaggtagattttatctatatccgaaaatttaagagacaaaactagttggagtaaaatagtggtccgaaaagggtaaacayagttcagaagcaagcaagcaaggctgacgcattgcttctggcatcctcttcattcatctatataaatctatggacaatat

SEQ ID NO: 1136 - DNA, 161 bp, Parthenium argentatum
ctgcatatagtttgatatatgtatttcactcgttactatgcgcctacgtaaccgaaaattccattatagctaacaaaattmatgcaacttttagtcaaaacgtctatgatccgttcttcacggccaattaatttaagtaactagtgtattcacaacaaaag

SEQ ID NO: 1137 - DNA, 161 bp, Parthenium argentatum
gcctatagtacatttacctcattagtccacttgatttctactcattagttcacgtgtgctgttaaaaaacaagagtttgawtagtttcattggtagcacactcacctaataaaacatagaccaggttcttttttcatagagaatatttaaacacttctttc

SEQ ID NO: 1138 - DNA, 161 bp, Parthenium argentatum
ctacaagtaattaacaacaatatagtcatcagaagttgcaaaagtcatatgtggtaaattatatttcacaaatgtcaaaamtcaccgactgccaatataattattatcatgtccgaaagataaattaagaaaatagattaaatacagatgtgacgttaaaa

SEQ ID NO: 1139 - DNA, 161 bp, Parthenium argentatum
tatatatttcatgtttaaaatatttcgaacttatcaatcatatgtttgtttacatcaatgcttaactgtgttgtgtttttwtcctacgaaaacaaccttttaatagaaagaatcattgttttttcaggtagtatcttggtgtgttatcaagcaactcaata

SEQ ID NO: 1140 - DNA, 161 bp, Parthenium argentatum
agttcaaacgtgcaattaactcgtcgtgccatgttggacaaaccagaaatgtccatcaaaaacaatacatactgtcatacygtggctatgattataggattataaaagttcacaaaaaaaaaaaattagtattataaattaagtaatcaagttacttgcct

SEQ ID NO: 1141 - DNA, 161 bp, Parthenium argentatum
tccgtgaaaaattaccaaaatagtcaaaaagttagaccaaagaatgtcaaaaaatagacataaaaatttagccttcaccamagtagtccctcatttcctccaatcagaagccgccacatcagctctgttggcttacatggttaagatttagcctatgcttt

SEQ ID NO: 1142 - DNA, 161 bp, Parthenium argentatum
ggatttgaaattgcacaccagcttggattgcaagggttaaccgttgttcttacttcaagagagactgctgtaggcgaagartcagcaaaagtcctacaagaaggaggcttaaaagtggtcttccatcaactcgacgttatagatcaacaatcgattgatac

SEQ ID NO: 1143 - DNA, 161 bp, Parthenium argentatum
tcgttctcagctctcattagctatgcatacaacaacaacacgtacgtatactgttacgagtctgctttataagtaaatttkttattccttgaaatcataatatcatttctcttttgctctttatataattcttgcaggactagagctggttattctagagg

SEQ ID NO: 1144 - DNA, 161 bp, Parthenium argentatum
gtcggcacctaatatcaagaatatttgtcgcagaccctgcacaggtttagtcatacaaaaatttcaccttctattgagtgktactatgtgctaatgatgtcgtacattttatcagagaatcacgatggacgagataaagaaacacgagtggtttctaaaga

SEQ ID NO: 1145 - DNA, 161 bp, Parthenium argentatum
gtgctgtcactgtcagtactgtcgctgtcaacatctgactcgatatctacttcttcttgatcctcaaaactttcaggattktctctgcacttattaatcaaatcctcatactgcttattattcttcttcaacttctgcctcatcgcattcaacgccttagc

SEQ ID NO: 1146 - DNA, 161 bp, Parthenium argentatum
ctgggtcgtgttcaatgcgttcagttataatctaaaagtttgaataaagcgctttaggagattgtatccattaaaaatagwgtttagatgagttttaacccatttgacccgtttgagttaaaacacaatcaaaatcgacccactataagtaaatcagtcaa

SEQ ID NO: 1147 - DNA, 161 bp, Parthenium argentatum
gtctatttgtatttaattttatacattctactattgtatgcgtgtaacactttactcaaataagttgactaccatataaaytttgaacttaaaccctttcctctttgatcatccaagtcaaagtgcatccttctctgttgcaaatggagtataatatatat

SEQ ID NO: 1148 - DNA, 161 bp, Parthenium argentatum
tggcctccaagatgatggcgcactagacgccgacacttgcaggctgtttatagcagaatagccactggaaacagcaggagsagcaggcaccaaattggaagcgctggtagaagctacattttccgttccgggagcacaagtaacctccgtttgactataat

SEQ ID NO: 1149 - DNA, 161 bp, Parthenium argentatum
taatgatcattcttcggctctttccaccaaaaaaagagttgaattttgcaatgatgctataacttcacctaaggtggagaktatatctacttctggtgcaggtaaagcttgttataatttttttttgtttgttattgaaatagggatttggtacttaaggt

SEQ ID NO: 1150 - DNA, 161 bp, Parthenium argentatum
gcttgctacagttgcttatgttcagctagtattggattataatgtattatcaaattaaatgaatatcttcattttctatgmtttaggtcataatacaagttcgaagaccggagctaatgttaaaataaatgggcagaagtccaagaagacagcaaaagctc

SEQ ID NO: 1151 - DNA, 161 bp, Parthenium argentatum
gggtacacttttggtaaatagtgtatctttaacaacgcccaaacaagatcataacatgtaatacaacaaataacttatctwttaaagcaataaagacagttaccagtatcccaaatagcaagcttcaacttcttcccatcaatggtgacatatttcacctt

SEQ ID NO: 1152 - DNA, 161 bp, Parthenium argentatum
ttccttgagatatgcgttgaacagcagaagaccaatgaggattccacatgtagggtccacctacagcttgaagggcaacarcacttgtgttccctccattgttcaatgttgtggagtttggcttcactggggttggagatttcagtacaggtggggccaag

SEQ ID NO: 1153 - DNA, 161 bp, Parthenium argentatum
cagtgaactgttcgtgaacagttcaatggaaagttcgtttatgtttcttcatttaagaaataaacgaatatcatatgagcwcatatttttcttcatctgatatattaacaagcatgaacatggatttttgctgatttaactaagggggtgtttgttttttg

SEQ ID NO: 1154 - DNA, 161 bp, Parthenium argentatum
atttaagaaataaacgaatatcatatgagcacatatttttcttcatctgatatattaacaagcatgaacatggatttttgytgatttaactaagggggtgtttgttttttgccagaagagcttcctggcctcttatgtctgcgccgcgcagaccatgcgca

SEQ ID NO: 1155 - DNA, 161 bp, Parthenium argentatum
tttttctaccataatgttatatgagatgagttgggaatgtgaaatatgaaactgattttctgagtattgcgatttgaagtygcgatttgaagtcgccatatcattttagtgatcaaataaaatgattttgttaaggggtcaaatagtcacttttttagcag

SEQ ID NO: 1156 - DNA, 161 bp, Parthenium argentatum
tttggtaacaactagtaatgttcatttcagaacttctttggttaaaatcttagttgatgattttcccctgttttttttttwaagtcattttgtgttgtgattgggcagctgtttttttatgctagagcaatagtcaaatgattcttcacaatttaagtgga

SEQ ID NO: 1157 - DNA, 161 bp, Parthenium argentatum
ttaaagaccttcattgagtatcaggttaaagatgaacatatttaccgttcaagggaaaggccccaagcaataaccgtaacrtcctcaggaagtcccataggaagtaacatttcaggtctgaacattccagaatttcctacctcaacccatttcttaaggcc

SEQ ID NO: 1158 - DNA, 161 bp, Parthenium argentatum
taggcatttaaagatggccaacgtggtacaaagcttcctggagtgttgaaaacactagttggagttgtgtatgcagacacmagcacaaagaaactccatagctgtaagttatctgtttaagtggtaaaataggtgtggctcggacaacaggtatgacaggt

SEQ ID NO: 1159 - DNA, 161 bp, Parthenium argentatum
aattaaacctataaatttctatatttgctagataccttttgtatttttgtatctaatatatgctcatagattattgtttgytcaaaacataggccctactttgtgttgaccattgttatgtggaagcacaaaagaatgcatatggaagcgcaaaagaatgc

SEQ ID NO: 1160 - DNA, 161 bp, Parthenium argentatum
agttaatggtgtactaattatttgtttgctagacaatagaaacgattgtactcatttcttcagccattatgtttcactgtygggtgatgtcactatgactatatatatctcatggtttgcctatgctattataatgtttatatataatttatcctttttaa

SEQ ID NO: 1161 - DNA, 161 bp, Parthenium argentatum
gccggtcagcaacaagaacaggttaagagtaggggttcgagtcggggggtttgatcaatttatagatgcatacaccgaccyggaaacccgccaggttactatgacaggtttctgtgtcgatgtttttaacacggtcgttggagagttgccttatgctctca

SEQ ID NO: 1162 - DNA, 161 bp, Parthenium argentatum
gataaaggttgacatcgatgattacatggttcgacaactggacgggaataaaaatgagtggggttggtgcaagcaaaaagktatagttttgaattctggtatataactcgactttatgcttcttgctacttgtcataattttactacttattagtcgttaa

SEQ ID NO: 1163 - DNA, 161 bp, Parthenium argentatum
atacacttgctccaccgaccacatcccgagcttcgatcaagtttcatgaaggttcatttcagttcatgaatttggcatttycactgatttatattggaattaaatatattcatttactattgttgtattttgagtgagctttcggtatgcatagttttttc

SEQ ID NO: 1164 - DNA, 161 bp, Parthenium argentatum
tatattggaattaaatatattcatttactattgttgtattttgagtgagctttcggtatgcatagttttttcttcgttttktagaaatggggctctaatatgcttgatgcagttatattctaaatcactggtagttggaatacgtgtgtagagtttaccta

SEQ ID NO: 1165 - DNA, 161 bp, Parthenium argentatum
gatgatgatgatgatgaagactttcttaggaaatgttgcagtgatgatgatttgtttgttgtcttcgatcatagtcttatwaataatgtgagtcaagatccttatgtatgtttcatgaggatcaaggagttgctatgtagtagaatttgttgaaaaacatt

SEQ ID NO: 1166 - DNA, 161 bp, Parthenium argentatum
taatgtataaactgtaggtggtggtctgctgaaacaatagctgtggtgactggtgcaaatcgaggaatcggatttgaaatygcacaccagcttggattgcaagggttaaccgttgttcttacttcaagagagactgctgtaggtgaagaatcagcaaaggt

SEQ ID NO: 1167 - DNA, 161 bp, Parthenium argentatum
tttccttataatttattttaaatatcaatactttattataagttaatacaatgcagtatctgattaggttagggttagtakcttttagagaagattaatgtatactcttgttagtttaaagttaaatatgttataaacctcttcattgaataataatattg

SEQ ID NO: 1168 - DNA, 161 bp, Parthenium argentatum
acaccttcgattattgtattcttcatagatcttcatctagtgtggttagatcacgtgattgtatcaatcactcttttagaycattaaaaatgctcggtctgcttatatttcatcatccacttaatatgtgtcatttgagcttaatattagcgtttcaaata

SEQ ID NO: 1169 - DNA, 161 bp, Parthenium argentatum
atttcatcatccacttaatatgtgtcatttgagcttaatattagcgtttcaaatattcgataatagtactaacatggtatytaaaagttattacttattacgcgtttatctgtaaaatgaatgaaattggtgtataaatttgcatttaattatttacaagc

SEQ ID NO: 1170 - DNA, 161 bp, Parthenium argentatum
taactgatgcaattttgatctgtttgtttggttttagcatcatactgttgatccgagccatgcacaaacaccatcttattwtgccccacctcttggctctgaaccagcatcctggaccagctacaatcatgctcagcagacagaagccgtgccacctggct

SEQ ID NO: 1171 - DNA, 161 bp, Parthenium argentatum
tgaatgtttgtcttttatgtatttcgtaactcatagatttatatagagtaaatacaatgcaagataattatgaaagtctawaaattaatgtacaggctacagataagcacaataaatagagatagttaactattattaatgtatctctaagaagatgataa

SEQ ID NO: 1172 - DNA, 161 bp, Parthenium argentatum
cacaataaatagagatagttaactattattaatgtatctctaagaagatgataagaacacgcatatataattataaatatwgcagaatacacacacattttatatccatttatgtcatgattaccatgctagttatggaatttgaataacagtaaacactt

SEQ ID NO: 1173 - DNA, 161 bp, Parthenium argentatum
atgtaattaacgttatgatttgctgcatatggagtcttgtttatctagaagtcggttagatcttaaagatctataaaatcwtaataaaatcatgaacagccctgtaaatggaagaactctgctaaatcacattaactttgtgcttcaatggtttaatgaga

SEQ ID NO: 1174 - DNA, 161 bp, Parthenium argentatum
tatagatgactaacattagctaaaaaagaatgtaacattaacaatagagggcttaacaatattgattaaaaattcgaacawagagatactaatttccaaggaaataaaatttacataaagttaaaacaactcaaggggctggaagatgatgttggatcgta

SEQ ID NO: 1175 - DNA, 161 bp, Parthenium argentatum
tgaatttttgaagtttgaactaccagaaggggaaaaacctagggtttctgcaacattcacgttaatcaggtatttgtttcktaattcttttgcttttcaatccagttattatgcacaataactttcatgttccagattccattagataattccgttatcat

SEQ ID NO: 1176 - DNA, 161 bp, Parthenium argentatum
gcttgctcctcatggcccagtttgttactgattcggatcgtgaactagtcgttgcaaatgtataccattatattagcatcyattgtcaactttgttgatagctcataaccctctaccatagaaacacaactgatgctatcatattcttggccttcattata

SEQ ID NO: 1177 - DNA, 161 bp, Parthenium argentatum
gccatatttcgtgagaagtgtaagaaggattaaaaactgatatgtagacatcatgttttggatttaggcatgatgttttakgttgttttggctagaaaaatacctaacacaacaatttgaaacacaatgtaatggagaaaattatgataaaatacgtttga

SEQ ID NO: 1178 - DNA, 161 bp, Parthenium argentatum
acctaacacaacaatttgaaacacaatgtaatggagaaaattatgataaaatacgtttgattgtttgatgaccgattttaktcttgtttcgctacgggaaattttggtgttgcccttgcaggtggaaaggttttttcctttaagagcatcacatagacaat

SEQ ID NO: 1179 - DNA, 161 bp, Parthenium argentatum
cacaatttatgcgtacgagaaaaagttagaataaaagaagaaaaatttgtagaaatgcagttattcgtctgcatttaaccraagatatatgaataaaattagtaaacagaacaagatatattagttgttatgatgcctggtttagaaactacggttttaag

SEQ ID NO: 1180 - DNA, 161 bp, Parthenium argentatum
taagaaatgatttcaacactgtcatcaccattaccctgcaataaaacacatatatagcaaacatgttaatataaaatatawaaaaaaggtaaaacattaaaaaaaatgcaaccttagacgcaaccttagaggcttgtacgaccatctgttttttcgaatca

SEQ ID NO: 1181 - DNA, 161 bp, Parthenium argentatum
atatataaaaaaggtaaaacattaaaaaaaatgcaaccttagacgcaaccttagaggcttgtacgaccatctgttttttcraatcattatgttcttcatcaactggaagctgtaaaatgttaaatgcaccgattatacaatgaactaaacatcacaggaaa

SEQ ID NO: 1182 - DNA, 161 bp, Parthenium argentatum
gcttgtacgaccatctgttttttcgaatcattatgttcttcatcaactggaagctgtaaaatgttaaatgcaccgattatrcaatgaactaaacatcacaggaaactatcatataatgatgcaaatgtataaaaaatacaaaccttagaagcctcaacctt

SEQ ID NO: 1183 - DNA, 161 bp, Parthenium argentatum
ttgataatttagtgcttatgctctgccttgttttctgggcatatcattttgtgttcatcccatttggttagaatgatttcbtgtgttgtcaactaaatcttttaccatttagaactaagtaaatgttttactggttcaggtgatcaaactgtcacgtttag

SEQ ID NO: 1184 - DNA, 161 bp, Parthenium argentatum
tcatttatgcgaatcttgtatcaaagatatctttcaattttgttttctaagatgtagcaggatatatgaggtatttttgtrgttgtttgatggatgaagctttaatcgggtagtagcaaacggatgtagttcggttcgcgtttatttgtagctaaattatg

SEQ ID NO: 1185 - DNA, 161 bp, Parthenium argentatum
attcaagaaactagcaagttgtgaagggttaacgatgcccggtatatgcacatcgctactcttgaggagctcagacacctygcggtacctttgatcttcagcatgagcctcaagcatgctcatattttgctcggttcttggccctttttgagcaatgtctt

SEQ ID NO: 1186 - DNA, 161 bp, Parthenium argentatum
ttgaatttttacttatactttttcgagcagtgtccacaagtttacgtcttagaagctgtttcacaaggaaaaaaagttatwctttaaaaatcttggtttaatttgaaaactaatatgcacctggtgtttcaaagtggctaagctcttagtgtgcattggag

SEQ ID NO: 1187 - DNA, 161 bp, Parthenium argentatum
acagcattacattccattatctttttttggctggcctgcagatggaacgtgttttaatttaaatttttagtatatttatgratagagtgtatagttttaactctacttaatatttcattttataaaatttaattatcttttatgtataataatttaaatac

SEQ ID NO: 1188 - DNA, 161 bp, Parthenium argentatum
tggtgaagcaatgttgacaaatgaaaaatttggatctagtgagtatccaattcctggaaggagacacaactgcactcatamatacatctacgcatatacatatgcccacacggacaagtctttgcgtgcgtacacacatatatacataaatacataatttc

SEQ ID NO: 1189 - DNA, 161 bp, Parthenium argentatum
aacacaataaaaattagccaaaaaagaaacaagtcaaacgagttgaaagtaaaacaaagtgtttatgcataaatctcttamagcttacatttataagttttagtatatgttacttggcaccctagttactagaaaggaaagaaaaacgaaatgttttggac

SEQ ID NO: 1190 - DNA, 161 bp, Parthenium argentatum
cagttatgtgtataagcaaaatcacaaatacatacacacaaaccaatactagaatacatttataaaaaaggccctattcgkcattttcagcaaaaacatttcaagaaactcatctgtcatggctgtgctgtgcagttctcacctgttgacctcttgttctt

SEQ ID NO: 1191 - DNA, 161 bp, Parthenium argentatum
gcatgaaatattgtgaaaactggattaacaaggatcaagttctttgtcttaaacaagccaactacatttttaaaataactwgataaatttctgaccggaccacaggcaaaatattgggacaactggattacacaatgaataacttctgttggaacttgact

SEQ ID NO: 1192 - DNA, 161 bp, Parthenium argentatum
tcatgtaaatcttgaaatttaaccactgtttgttgcatgaacatcttataacacattcaagcaacacaaatacgtatgaamaactctcaaattaatccaaaacagaatagagcttttgagggaaaatggaaatgatgattataaacattaacctaaaagtt

SEQ ID NO: 1193 - DNA, 161 bp, Parthenium argentatum
tgaaagtgattatatggcaatcatccgataacaaagtgttcgaagaattctgataactagaccaaaagttgattatttgtrtaatcagttttggatatatgactctctgtgaaactaattacatgaccatacataaaataatataacatcttgctgatgtg

SEQ ID NO: 1194 - DNA, 161 bp, Parthenium argentatum
aaattaaccgctagaaactcgttatcattgatccaaaagctcgaaaccgttaggtcctcaatcggtgttaatatcggttcraattcaaaattaaggtctagaagtttggcaaactcacgcagacggttacccgtagcgagaatctcatgtgcgggcgagga

SEQ ID NO: 1195 - DNA, 161 bp, Parthenium argentatum
aaaaaaaaaaaaacaattagctgaccttccaaaccggtgtgaaatgcaccgaggcccgtccaagatatacaactgttgatrgtagaaatgtcatacacgttaaggtaaacaggggcggttccaggagggtaaaaacgcgaagagtcatctcttggcaatat

SEQ ID NO: 1196 - DNA, 161 bp, Parthenium argentatum
tatcatataaatcaggaggagccttggcccttgggtggcaaaaacagaaccgccttgaactcaacttcaccttcagcattrcaaatgactccatgccagtggcttctcatcaccaaaatcctgttaaacaaaaacaaattagaacatattgtgacgaacca

SEQ ID NO: 1197 - DNA, 161 bp, Parthenium argentatum
aagaaaacgagccagtggtggtcaaggctgctttgaatgatgtagaaaatgtttctgtagctggtttggagggagatgcgrctcagtcaacagaagttttgaccaaagctatgcctgaggatgcagattatggtcttgaaaacggggcggctgacaagttc

SEQ ID NO: 1198 - DNA, 161 bp, Parthenium argentatum
accaaatatatgtcgttcaaaagtcaagtgagtggtgtctactctaacgccacgaaatgtccaaatgtcaacctctccatmaccacaaccttccacgatgctccctctgccaatctatatatagtatttatatcggagataataataaaaaaagtataaca

SEQ ID NO: 1199 - DNA, 161 bp, Parthenium argentatum
cattcgtacgaatggcactaaatatatataacacagacaccattcgtacgaatgggatcatacttatatcccattcgtacraatggctatggccatccatacgaactttacaaactcgtcgttaacacgtaaaacgacatacaaacaacgttctataacca

SEQ ID NO: 1200 - DNA, 161 bp, Parthenium argentatum
gcagcaaaaaaaaaaaaaaaaaaagccaaattaacaagaatgtattgccaaaataataagtaataacccgttttcgatccratcaaaaacaaattttctaacaagaaactaacttttaaacctttagtaggtaacgggcgcaaggatttcaagttgggttc

SEQ ID NO: 1201 - DNA, 161 bp, Parthenium argentatum
tgtcaaccccagaatactcgtgttgttcgggttaacgtgtctaacacaattttcaagtcgggttaaaacctgtcaacccawacacgacccatgtagcacccctaagcggtgaagggataacaaatagaaagagttgtagaaacgaacccgatacatcttct

SEQ ID NO: 1202 - DNA, 161 bp, Parthenium argentatum
acaacccaaaagaagttgacccatgacctattagtctagtggtatggtgtcccccccttacaaatatgaggttgtgggttyaaatccttgcaaatgcaaggtaaaaatggaattatgggtgttaaaaaaagttggccgttaaaaaaaaaaaaaaaaaaaaa

SEQ ID NO: 1203 - DNA, 161 bp, Parthenium argentatum
acaatagtgacacaatgatcatttaaaaagaaaactaaaaaaaattggatgaaatgtgcttcgagccaaaccgtggctctyactaataagccataatctgataatactatctaatacaaaccacccgacccgttttttgccacatgtacacaccacacata

SEQ ID NO: 1204 - DNA, 161 bp, Parthenium argentatum
ataatctgataatactatctaatacaaaccacccgacccgttttttgccacatgtacacaccacacataatcataagactwacatttggtgaattacgacgagtggtggcagtcaccaaagtaataccccctgtattatcatagactggtggtttccactc

SEQ ID NO: 1205 - DNA, 161 bp, Parthenium argentatum
agactggtggtttccactctgcaagaactgcgtaatgcaagaaaaaagtaatataattacactatccaaatctgtgaaaamaattataaattgtgtaacttatcttatggctctgtattttgtttttaactattctttaacatacctattaaggtgcatcc

SEQ ID NO: 1206 - DNA, 161 bp, Parthenium argentatum
attttctatcataaatttgttcattcggaagccaaaagttggtatcaaaggacttttggataaccaatatctaagagagakagaagaagagaaagctccaagaaaaacttaacgacagttttgacctctggtcacacacgcgaggcattataaatttccgg

SEQ ID NO: 1207 - DNA, 161 bp, Parthenium argentatum
cggctgaggcgcacgcctcgaggcgaggaggctagaaaatgagtctgaggcggcgcctcatcgggtatttttgtacgtgcrcctcgtagggatgaagcgctaagaaaagttgcgcctcagggggttttgatgtgtgttcttgatgttataaactttttgtg

SEQ ID NO: 1208 - DNA, 161 bp, Parthenium argentatum
gctaagaaaagttgcgcctcagggggttttgatgtgtgttcttgatgttataaactttttgtgtcaatttcaaacattccrtgtctttttgatgaacctggtgacgaaaatagttggtattttatttattataagatatataattttatatttatttttta

SEQ ID NO: 1209 - DNA, 161 bp, Parthenium argentatum
atgctatatattatatgatagtattttctgggccctcagtttaaggaaggaacatgcaagggattcaattttggaacatayttgaaataggggaaattttgaaaacacaatgcaagtttaccaatatttttaaatatagtttactgaatcaaaggggggat

SEQ ID NO: 1210 - DNA, 161 bp, Parthenium argentatum
atgcagagcaaaataaaagtgtgaagggttacaataagccacagaaacatagaaataagtctttggcagatctgattaacrgtgactgaaataaagaagctaccatcaacaggtcattgcaaataaaatagtccagaacaacgatatatcataataacagc

SEQ ID NO: 1211 - DNA, 161 bp, Parthenium argentatum
tcaacaggtcattgcaaataaaatagtccagaacaacgatatatcataataacagcatgagcttctatatcttatttacaygtttgatggcattttgtatctatatggtactgaccaagtagtgctttgcattacaataagaaaacacaaattcttatgtt

SEQ ID NO: 1212 - DNA, 161 bp, Parthenium argentatum
atctatatggtactgaccaagtagtgctttgcattacaataagaaaacacaaattcttatgttgctggcaagtacaaaatkgcaacacaaaatgaatagttaataaatcctactaagtatgatacttagcagttagccccaaataaactaaaaactatcct

SEQ ID NO: 1213 - DNA, 161 bp, Parthenium argentatum
ggatataaatattgcttttcacaacctgcctattattaaaaggtaccaacaggttttttaaatcattgatttacaattatygttcagttttgtgaagattttaagttatttttgtttgttggtgtttcagattgagagaactgagcacagctgagattggt

SEQ ID NO: 1214 - DNA, 161 bp, Parthenium argentatum
ctacctgctaatccacccttaaaagatgcacttgcatctaatcgtaatggacctacttcttttaacattgagaactctcayataagtcctcagatgggtccatcatggtttgatcaatacggaaagttgaaaactggtcaaatgtctttacaaagggtgga

SEQ ID NO: 1215 - DNA, 161 bp, Parthenium argentatum
ggttacgtccattctggtaggggccagctctgccaccactgcgaccaccacgcccattcccgtaacctctaccaccaccaygaccaccaccaccgctgctacggccattgcctctttggttgtaggatcttctaggtacatactgttccttgtactctgta

SEQ ID NO: 1216 - DNA, 161 bp, Parthenium argentatum
acgaacccttacccacatatatataagttatattgttttgcggttcttaaatctgattcaaccgggttgaccattgaactwgtaaaaagagcggttcaacgttcggtttaacgtgaaaacactagcctgactttctttgggaataatgaaaagtcaaacta

SEQ ID NO: 1217 - DNA, 161 bp, Parthenium argentatum
actctaaagtatgtatacttgcttatacttttcgctcaccatatgcgaaatttcattttcatcatatattccatgattagytggcacatatgccttttttttgttgctcagactaacatgctcgatatttcaggtataatgttgcgattaagtgtgccacc

SEQ ID NO: 1218 - DNA, 161 bp, Parthenium argentatum
tttcattttcatcatatattccatgattagttggcacatatgccttttttttgttgctcagactaacatgctcgatatttyaggtataatgttgcgattaagtgtgccaccattactccaggtatattcaagttaataaacctatattggaaatctagcac

SEQ ID NO: 1219 - DNA, 161 bp, Parthenium argentatum
gtccagttaaatctcccattcggtccggtcccgttacattaattaattaaccgttaatccttacaataaacaaacagtaarcatcagtggcggtttagagctatcttcccctctgcaaaaccctaaatcgagtgtaagtatccttcatcaccgatcatcaa

SEQ ID NO: 1220 - DNA, 161 bp, Parthenium argentatum
tatccacgttgattctggtggtatccatgtgtctgagggtttgacctactgtaatgggtatttgaaccataaggttgaccrtgacccgggtcatagctatgtggaggataacctgaactaggctggaccatcctacttgagtcctgactgtagtagggtct

SEQ ID NO: 1221 - DNA, 161 bp, Parthenium argentatum
atcgctccccacttgttggaagccatcaccaattctcaaatcttcctcgtcgtcttctcgtcccgctacgctgattccagrtggtgccttgatgaactttcccatatgacccattgcatgtgtcacaccaattatcaacagacccttcttcctgttttttt

SEQ ID NO: 1222 - DNA, 161 bp, Parthenium argentatum
tgcaaatatgtatacttctcagactaatctgaatgatgcaacagcctgaaatgaacaagaaaataacaaaaagttaattargttcaaacatttgataagatctatatgtacattgcttggataacgggcaaaaccgggttaacaagtcatattttagcggc

SEQ ID NO: 1223 - DNA, 161 bp, Parthenium argentatum
tggaaaatttcaagaatgaaagtcattagtagggaatcaagctagtaaaagaatcaagaagctaaggactaataatggtcyagagttatgtagtggtgagtttaaccattttttttaaacaaaatgacataactagatatggtcggaaagaaaatagaaat

SEQ ID NO: 1224 - DNA, 161 bp, Parthenium argentatum
cctccattgatctggcattttcccagatttcaaattttgctataagatacttaataagtttcagttatgacataaaaacckttatatttttttgcaataacatactttttagaaggttagaaataacgagatgtaactgatatgttgcaacgatagcggat

SEQ ID NO: 1225 - DNA, 161 bp, Parthenium argentatum
aaccctcaatgcaaataattgttgtgttaaatattataccaatgatctatgctttttacagttgtgaacaacccaggcagyccattattcccagacaaactcaaattcgctaaccctttcaaaacaatcaaagtactaacctttatctcaccgctcaactg

SEQ ID NO: 1226 - DNA, 161 bp, Parthenium argentatum
ttacagttgtgaacaacccaggcagcccattattcccagacaaactcaaattcgctaaccctttcaaaacaatcaaagtaytaacctttatctcaccgctcaactgtagcaaataaggacacacttcttagttcttacaaaatggttgttttagttcgcat

SEQ ID NO: 1227 - DNA, 161 bp, Parthenium argentatum
agttggtcaagcaccttcatttcgtcataaagaaccttcgttttccttgaactatcaagaactttgtccataagttgtagmggagcttttacgcctgcgttcattatggccagccaagcgcatacgacaactccttttggcatcatcaaattctgttatgt

SEQ ID NO: 1228 - DNA, 161 bp, Parthenium argentatum
aaggtgccaaaacatgccttaaatggttccaatatgcttcttatgggatttcccgatttcgggagctctttttttctgctrattcaacttgaagacgactttagacctctttttaagttgctagaaactcagccagatccatcaggaaaagccgaatcatc

SEQ ID NO: 1229 - DNA, 161 bp, Parthenium argentatum
ctcagccagatccatcaggaaaagccgaatcatctgttacccgcattaaagttgttgacataaatcaaatgcatttgcttraaggcgaactcaatttgagccttcttgattataatgcccttacatcctctgaaaatgatctgggccctagtcaggcttct

SEQ ID NO: 1230 - DNA, 161 bp, Parthenium argentatum
aaatcaaatgcatttgcttgaaggcgaactcaatttgagccttcttgattataatgcccttacatcctctgaaaatgatcygggccctagtcaggcttctgatcaaggttttctttctgatttgactgttcaaggctccggtctatctggtttttcttcac

SEQ ID NO: 1231 - DNA, 161 bp, Parthenium argentatum
atgcccttacatcctctgaaaatgatctgggccctagtcaggcttctgatcaaggttttctttctgatttgactgttcaargctccggtctatctggtttttcttcactagtggacgaaatctttgagcaagaaaagcgatcttctgcacctgcgtattct

SEQ ID NO: 1232 - DNA, 161 bp, Parthenium argentatum
gtggtggatattctttcaaaattagcaacagagttgaaaagtcacgattaagtgaggtggtgggtgaaggtttaaatcccrgttcaacggtcaatgtggctgatgaagtcaaagttgaccgtttaacggatagaccgaatacctcaaaaaaaccaatgcct

SEQ ID NO: 1233 - DNA, 161 bp, Parthenium argentatum
tctcatttatgtcaagtacatcacaaaaagcgcttcagtcagctttggcttttgcatctgagttaaactttggtgataagycaaaagtttgaccattgtcttccatgaagaatttaaccatgccaattgtgaaatgggatcgaagattgctaaacgtttaa

SEQ ID NO: 1234 - DNA, 161 bp, Parthenium argentatum
gggatcgaagattgctaaacgtttaattcctaggcttgtctgctgactgattttggttaatctacaactgaattgtaagtwacatcatattttatttatatacagctgatgcttatcaaagttaccgtaatgttattgtctaacttactatatcatatctt

SEQ ID NO: 1235 - DNA, 161 bp, Parthenium argentatum
aacccgccaacccgatcaacatgtacaatttgatcactacctgacaaacgctctcaacacatttacataaatgggttaaasaggtcgtgttgggattgcatgatcttaagtgtgtttgggttagagttgattgttttttacacatatatgcctcatgtctg

SEQ ID NO: 1236 - DNA, 161 bp, Parthenium argentatum
caactttatagaaagcttgtgtgttggtgagggaggtgaatagtggcatacccgtagtaacgatctttgatattctgctgrgataactcgccagtgacaggcatctcatgcctgtaagggcattcagcacctctagtacattcacctctgatgaagaaact

SEQ ID NO: 1237 - DNA, 161 bp, Parthenium argentatum
ttatattgaaaactgattatagtgatcacaagttaggaatacttagataatcagtttcaaagcgtgtatacagaacagacwcactgtaatagaggagtagacatacttggttgtaactcttgatttctctgtgacattatgccaggtgtaatgagacatca

SEQ ID NO: 1238 - DNA, 161 bp, Parthenium argentatum
ttttaagagtacctaagctattaagtgaaggtgtgtgccagaagtgcatacacttcttgtcaccccactgataataagaamacgagcatctaatgatttgttttgtcagccactatgtccttacgaatgatctacataaaagagttggaatttgcctacta

SEQ ID NO: 1239 - DNA, 161 bp, Parthenium argentatum
ctgactcctggtcaatcgaattttttggatttttaaacatagatctgtttttatttatttatttatttatttatttttacwaaaacatgagttggaccccttaattgtaacaagtaaagaaaagaaccttaatgtgaccctcgactaagaattaatggttt

SEQ ID NO: 1240 - DNA, 161 bp, Parthenium argentatum
atttatttatttatttttacaaaaacatgagttggaccccttaattgtaacaagtaaagaaaagaaccttaatgtgacccycgactaagaattaatggtttcgccgctgtacaagtgtgttgtaagactaaatgcagccgggtgatcataatcataatcac

SEQ ID NO: 1241 - DNA, 161 bp, Parthenium argentatum
atattatattatgtccatgttgatacgcgtctgtgtgcaaaactacgactatgtctgcagccttcagtttagtcatatatrgtcacttggagctcatcgttttatttggctataagcaaacatgatctatgtcacaatattttttaaaacactttttacga

SEQ ID NO: 1242 - DNA, 161 bp, Parthenium argentatum
atgaagtttagaatatacaaaaaagagatgtatgcacaattaccactcccagttcatctggatacattccgcggttcgaawagtggcctccttttgcaagtttagcacggaatgtcacctaaggatagaaaacatcatgttaaattttcctactaaatata

SEQ ID NO: 1243 - DNA, 161 bp, Parthenium argentatum
ccgaaataagaatcatcaaataaaatcaggaacaagccatttaataaaaaagaagaagatcaacatcttgttaatgtaccwgaaactttccagatattattgcatgatcatgctgaacattcacagtgacagagggaggggaaacatcaaaaaactgtatt

SEQ ID NO: 1244 - DNA, 161 bp, Parthenium argentatum
gagagaacatactatatcaaaccatctatgtcttgtgtagcaagctcgcattccctacttaaaccatcagtcaagagatcytcaggagtttcagtaccccgcacacaaatcacaacagattttatatcatggactgccacaacaaagtatgctgcttcaca

SEQ ID NO: 1245 - DNA, 161 bp, Parthenium argentatum
cagccattgtgcacagaacgctttggtgatatttgaggcggtgcattccttacagcctagtcatgtgaacaaaacaaaacsatgtgcgcttcgcctatgtatcaaggttatagtcttccaaggtctggtgactggtatgattaacaaaaaaaaaaaaaaaa

SEQ ID NO: 1246 - DNA, 161 bp, Parthenium argentatum
agggttggaaccgatttcaacatcaaatttataaccattatatgtttgtttaaacactggtaagttaacttaagcaagaarcaacgttaaaacggcttacttgtccatcttgcattcctttctcaatatccacagtgataaagttcccttccctttcatat

SEQ ID NO: 1247 - DNA, 161 bp, Parthenium argentatum
ctacttccattaaagttctgcactttatattggtgtctagacgccaaaaccaaaaagaccaaaaagtttataactcctagwatagcaagcagccaatagaaattctccagtttgcccttatttaaattattcgttaaccaacttccttttgttgccatgtc

SEQ ID NO: 1248 - DNA, 161 bp, Parthenium argentatum
ctaaatcagtcagtatatatttatgttatgtacaagtagatgttgaattagcatgtattcgattcttttagcatgtattcratcaaaaacaattcagaaataatttgctatttagatattatggtgatttttaatgattgttgtactttattatattgatt

SEQ ID NO: 1249 - DNA, 161 bp, Parthenium argentatum
tagttttatttcaaaataaacacaagacaggtaaaaatactaaccacccctctatcaatctatcctacacaaaacattaawaaaaagcccaaaatcgtcgcgtaaaaccaaacaaatcctcataaaaccgcgctacatcactaaaacttattcttataatg

SEQ ID NO: 1250 - DNA, 161 bp, Parthenium argentatum
ttggttgtcagaacgcacgctcgttatgaaacgggcttcttgcttgaaacttataagtcgtctttgtgcagaagatgaaamcgacaaagctcttacgctatataaagcacttgatgcatcagataacagttcttgtaagatattgtacagtaaacttatat

SEQ ID NO: 1251 - DNA, 161 bp, Parthenium argentatum
tatatctatgtattcccgagttggagaaatgaagatggctagatggttttttgataaaatgattcaaaaaggattaacacyggatgcggttacctacacgatgatgataaacggttattgcagggtgaatcacttgaaggaagcttattatttattcaatg

SEQ ID NO: 1252 - DNA, 161 bp, Parthenium argentatum
gacaaaagttgggttagttcgaacatgtgaaaaaattgtaagaatatattgaagtagaatcggtttgattgaggccatatkacaagaatgattcactttaaacaaatgaaactattatttgagtatatcttctataaaggatcagaccttttcatagctaa

SEQ ID NO: 1253 - DNA, 161 bp, Parthenium argentatum
tttgcatataaacacatgagaagtcctttaaattaaaaaaaaagaagtttaaaaaagtaaaaatattttcttaatttattkgtttcatcatgtatttatatgcaaaagctctaaaatagttatgtaaaaataatatattttttttttattttacatgtaaa

SEQ ID NO: 1254 - DNA, 161 bp, Parthenium argentatum
aagatccaaaattcaaattacaaaattcaaagttatgcaacaagaatctagttaacaacgcatgtaaaacacactacataygtctaaccgccccgagcttctcttctggtggcatcatggagcagttcgatgtcgactccatctggtggtaactgcacata

SEQ ID NO: 1255 - DNA, 161 bp, Parthenium argentatum
ctgcaaaaccacccatcacatcccgaccacaatcttagtttgtacggattgtattcatcctttatgtgtagcgtttgcaawactatacaagagagtatctgcgactattattgttccaaatgcgcattcaacatagacgtagtttgtgctacaatgtatga

SEQ ID NO: 1256 - DNA, 161 bp, Parthenium argentatum
gcaatactatacaagagagtatctgcgactattattgttccaaatgcgcattcaacatagacgtagtttgtgctacaatgyatgaacagaagatggaccacccaagtcaccctcaccagctgaaacgttgtttcggtcggatgatatcccgttgtaatgct

SEQ ID NO: 1257 - DNA, 161 bp, Parthenium argentatum
aacatagacgtagtttgtgctacaatgtatgaacagaagatggaccacccaagtcaccctcaccagctgaaacgttgtttyggtcggatgatatcccgttgtaatgcttgtaacagtgaacatagtgggaccttctatcattgtaccacttgtttttactt

SEQ ID NO: 1258 - DNA, 161 bp, Parthenium argentatum
cgttgtttcggtcggatgatatcccgttgtaatgcttgtaacagtgaacatagtgggaccttctatcattgtaccacttgyttttactttaggatccacttagattgtgctttgcttccacccaagttacttatcgaacagtctacgaatgggagtttcag

SEQ ID NO: 1259 - DNA, 161 bp, Parthenium argentatum
agaaaagcttcaaaatctccggtgaattcaactttcatataaagatgttttacttcacttgcgagttgaagcattttgtcwattgcatcccaacaccattgaacacctctaattgataatgattcaagtgccatgagtttaccaaaatccaccatgtaaac

SEQ ID NO: 1260 - DNA, 161 bp, Parthenium argentatum
tttcttgttcaattttgggataccatccactgtttagccattttccttttaattagtacttttcttatttatactcatctygctcattagagatattgcataaaccacgtcaacccgttcataaataatgggtccaaaatgcgacctttgaaaagcatatt

SEQ ID NO: 1261 - DNA, 161 bp, Parthenium argentatum
tttagatttcatgcagtatacaaaagatgtgacttacagcaaacagggtgagtatgtatgcaccagcagttactcccatgmacataactgcaccaagtctgcaaaagcagatcatgagaaaagaaaaagatttctgtatgctcaattaagcgagaggaggg

SEQ ID NO: 1262 - DNA, 161 bp, Parthenium argentatum
gtattagcttttactaatatcacgttgcattcttgaacaaagtgatttatatatgaggatcattaaataaacactttggtyaacttccgacccgtactttataataaatcgttgcttatttattttcgtcggtgtagttcccaaagcactccaaggattga

SEQ ID NO: 1263 - DNA, 161 bp, Parthenium argentatum
ataaacactttggttaacttccgacccgtactttataataaatcgttgcttatttattttcgtcggtgtagttcccaaagyactccaaggattgaagagctgcttcaggaggacggtaatgttaaacgtaaaagagagaaaattcagaaacaatccagcct

SEQ ID NO: 1264 - DNA, 161 bp, Parthenium argentatum
agagctagttcacgtgttatagattagcacgctaacatgttggtgaatggcccattggtcgttaggctgcataaagaaaawtataatttaaacaaagagtaatataataaatgtcaagactcaaggcataccttgcattagatctagtatagcaagttcat

SEQ ID NO: 1265 - DNA, 161 bp, Parthenium argentatum
actcaccgacattcgattttataacacaaaagaataaatacaataaactgaaaaacatatataattgaaataaagtaattragcatttggaacgtgaatcggttcattggttggaactctaatggcttgagcaactaaccatacttttttaatttgttcat

SEQ ID NO: 1266 - DNA, 161 bp, Parthenium argentatum
tactggtattaaatatgctaaggttgtgatcagaagtactacatactcatatgctgcttcacaaaaaaatatagacaccawtttatctagaaattttagccatttatctttcatgttcataatggttgcaggttctgggtttgaaagggtaaaaaacaaat

SEQ ID NO: 1267 - DNA, 161 bp, Parthenium argentatum
cgtagttattgttgacgtcaaattgtatgtgataactaacaggttctacctgtaagctacttatggtttttatagtttcgwcttggtgatgtgatgcattgatccttttctgctgttgccctaattgagtgtatctgcaggtatctgaagcatcagttagt

SEQ ID NO: 1268 - DNA, 161 bp, Parthenium argentatum
tcaaaaccaaaacagaaaacaattaccagtttatcaggtgcttaatgcaataaaggtggtaatttcaactgatgggtcaaycgagttatgtttcatctttaaggggtcaaatggtttaatttaaaaggtttatctgaaaacgaaacatatcaaaatgggtc

SEQ ID NO: 1269 - DNA, 161 bp, Parthenium argentatum
tctacaaatttctctctctacccacagttcatgtatcacttaagacggtctcagtttatcgacgtgttcaacagcagtccwgatgaaacggcgttttttcaggtgatgttgaaccgtgaaggagtcgtggggtcgttaataatgattcaaccgactctttc

SEQ ID NO: 1270 - DNA, 161 bp, Parthenium argentatum
agtaaatgcaagaaagttaccaatacgattaataaacgaaaacaagttcaaacacaattaactgtttaactaaatcaacaygagtagtcaagttatactagttcatacagcaaagaacaactgaaaataagaattataaactgaaactgttcacccgagta

SEQ ID NO: 1271 - DNA, 161 bp, Parthenium argentatum
attgcagattatgcagaatgaaaaaagaatcaggaatcctttttttcatatatctctggtttatgctcttatagtacatamaatggttttacaatttaaagacgttgtactaatttgtggacaggtgctacaaagatcttccagaagatgaatatcagtga

SEQ ID NO: 1272 - DNA, 161 bp, Parthenium argentatum
caagttcagatattaaaattataggcatcagtaacacaaagaaaattatgacgaaaaaaataagcgaacttactgattaakagtgtttcaaagatattatcgggacgaggtaatgttgcaagccgtgaaccctacaatcataaacaaaaacttcaaactta

SEQ ID NO: 1273 - DNA, 161 bp, Parthenium argentatum
atatcacttagattgaatgtcttgaagacccatactgattggaggaaaatggaattgacaaagttggaggaaaactaaaaraagacatgatttaaaaaaggagcaaaaacaagcaacataaactaattgtggacatacaatatgttaagtaaatatggcaa

SEQ ID NO: 1274 - DNA, 161 bp, Parthenium argentatum
aattgacaaagttggaggaaaactaaaaaaagacatgatttaaaaaaggagcaaaaacaagcaacataaactaattgtggrcatacaatatgttaagtaaatatggcaatgatacatgaaaaagaaagccatatcttagtaaagcacgtctcctaggaagt

SEQ ID NO: 1275 - DNA, 161 bp, Parthenium argentatum
gacatattttggagccgaaacttctataggctttttgatttgcacaccatcagcccatcggtactcatacctgtaaatttyatttaaataaaaatttaaggatcatgtatgtttatatataagatagattaattttaataaacaaaaagaatcagtataac

SEQ ID NO: 1276 - DNA, 161 bp, Parthenium argentatum
atgattggtgttttacttcttaacaattcatatttcaattatgtgggttgcagtacatctatatgtaatatgatggcaaaytgtaactaatgaaattcatatgaacatttgttttgatcataagatactttgcattaattgaattgtgttgtttcatttac

SEQ ID NO: 1277 - DNA, 161 bp, Parthenium argentatum
attgctggattgataggtggcgtttttagcttagctttgttgacattcatcatgtggtatagaactcaacaataccaagaraggaaccactcaaaacaaagtgctgaaaaacaagggaatcaacaagaaatatcttcggttcttgccacatcagcacctaa

SEQ ID NO: 1278 - DNA, 161 bp, Parthenium argentatum
tgccttagtgaagaggggtgccctttctaattcttgaaaaggaaaactgtatagcttccctatggagactaagatctaatractccctaagacttcacttaaccaagatattttgtcagcttcctcaaaagcagtttcccagagagtattcagtatatccc

SEQ ID NO: 1279 - DNA, 161 bp, Parthenium argentatum
aacaaattcattaacgtggtaatctttatagacccaaacaattgaaaatgacattcattttgagaaacagaaatgtaacamtaaatgttcatttttttttactgaataccagttttgagcatcaacagaaaaactagataataaccgacacacaaaataaa

SEQ ID NO: 1280 - DNA, 161 bp, Parthenium argentatum
tgtgatcttttcggaaaagcgacttttttgctggtcttttagttgaattactaagttttttttttagtttttaatttttawtttttttttaaatgtgtgatttaattttgatacagataagtcaaagggtgtttgaagttatgaggaagaaagggttagat

SEQ ID NO: 1281 - DNA, 161 bp, Parthenium argentatum
tgaaatctgaatttgatgaatatgaactctaggtattcttttggggttatttcttttgttatataagctcgatgatgacgrgccaatgctcagttgagagcttcttggatgtgtggtttcatgctatgttgttggctaagggtgtatgatggtgggtttgc

SEQ ID NO: 1282 - DNA, 161 bp, Parthenium argentatum
caagttgcttatactcaaagcaatctagttttgtgtaattgttacttacgtaactggaacaggcagttggtgtataatagytaagaatagaggaaacctcgggttaatttataccggtaattcttttaaatatatgtgttgcagtctggtaaatggttttg

SEQ ID NO: 1283 - DNA, 161 bp, Parthenium argentatum
ccctagcatttaacaaatattatctctattttagccttggttgatagacccttcaaaaattaaaatagaagtttgactttraaagtcatccttttcctgatgtgtcaaaatgtgtggtttgggtaatgggtcaaagacgtaacatttcgtatggactagcc

SEQ ID NO: 1284 - DNA, 161 bp, Parthenium argentatum
tgaaagtcatccttttcctgatgtgtcaaaatgtgtggtttgggtaatgggtcaaagacgtaacatttcgtatggactagscaagtttggttgacccctaacaaaattctattatcctgattcaaattctgtttttttttttttttcctgaataatatgat

SEQ ID NO: 1285 - DNA, 161 bp, Parthenium argentatum
ttttaatcttttccaaagatttacttaaaaaatgaaaacatgagaaagtcggtgataggccattgggcttgacccactttrgttaaaccactttgatctgtaaagaaacgggttgacccgtagaacccacccggaaaacccaagtacttgcttttgtaaaa

SEQ ID NO: 1286 - DNA, 161 bp, Parthenium argentatum
tgttatagtcaaacatcactacaacacaccactcggtgcccaaaagcccttgagcgggaatcatttgacaccaccacacawttttcatttttatttcttttatttaatttttacttaaaaaaactacacccatgtgaaatgatgatttagttaaaggttcc

SEQ ID NO: 1287 - DNA, 161 bp, Parthenium argentatum
gatttagttaaaggttccctggctacacggcaatgacgtagcactttaacaataacgtgtggctaaaccactacatttagwctaatctcttactaaatgcattaatataattataatataatgtgttttacattatatgtttttttctacacattgtaatt

SEQ ID NO: 1288 - DNA, 161 bp, Parthenium argentatum
atgttgggcgagcttaaaaagctgattgaagcgaatcctctttttcgtgataagctaaacttcccagctttgaaaaattcmagattgcgtacacttatcaatcaaaggttcatattagatactccccgtatctgggtctgacatttcttgttcaagttcac

SEQ ID NO: 1289 - DNA, 161 bp, Parthenium argentatum
catttttatcccgttaaaaagcttaaatgcttttcaagacattggcatactaacttagtatactttagggtagtttatcakaaattcgtatttatcatgttagaaagcttatatgttttttttcaaaattccatttatataactccagttatgtgctgcct

SEQ ID NO: 1290 - DNA, 161 bp, Parthenium argentatum
acctacctaaatgaggggcgttttggactttttgcttatgtttatatcaataaatactctttatttatgttgttccccttwtaaaccaaagtaaaccctaaaatcacatgggttgaaccggttatcaaacttctattaaaattattcgttgcagcctgtaa

SEQ ID NO: 1291 - DNA, 161 bp, Parthenium argentatum
cgaaaaaaaaagtgatcacaaaattgcttgagatagacaaacagaattcggtagcaggggcaagaaggacatagacaacaygaaaactgatcacaaaagttgaacatatagagacagcctaactttcaacaacatacaaagttaaaaaaaaggaacataag

SEQ ID NO: 1292 - DNA, 161 bp, Parthenium argentatum
aagcaaaacaagtagaacaaacaaaaaaaaagtttattgttaagtggaaattgattcatactgattgctaaaataatgttyctacaaagtaaagaatgttggatgatccatttgttttaagacgtaacgataaaaaagtttaaagtgtgacaaataaaaaa

SEQ ID NO: 1293 - DNA, 161 bp, Parthenium argentatum
gaatatgaacatatgataacgctgcttcatttatgtttgtgaacgttcatttggttcatttgaatttgtttgtgtcagttmgttcgtttacagtaatatccgttagtttacgttcatttattcgtttatatttctagattcattacaatttagtctaaatt

SEQ ID NO: 1294 - DNA, 161 bp, Parthenium argentatum
aggattggaagcctaagaaaattcactcggatcacaaacaattgttcacacgtacaatactaattgtgatgaattacgttmgagagagtataaattacaacaaaaatgtatcgtttagtgtaaagaaactgaattaaagagtacctgaagaagaagaagaa

SEQ ID NO: 1295 - DNA, 161 bp, Parthenium argentatum
caaaatccataatcccaaaaccattctacgtatctgaaccgtttctttaaaatgacccgcgacgggaatacggttgttacygtcttgcttatttgtggtaccaaaattcgctacagcaaccggtaaaaaaaacctaagttaaagagtatttttatcaaaag

SEQ ID NO: 1296 - DNA, 161 bp, Parthenium argentatum
tcctctggtaacactggtagtggttcaagttctaataataataatattattaatcaagttgagagctttgaaaaacagttkatgatggataatataaagcaagaacaagatggggcttatgtttatcagaatcaaagtcaaagtcagtttcagggtcaacc

SEQ ID NO: 1297 - DNA, 161 bp, Parthenium argentatum
cgtacgtacattactctaatgttgaattaaacataacaaaatattatgacaagcatcctataaccttaagcttgacaaccyggattatatcatttacatggaaaaacacaaacacatcaagcaacaaataaaccggttcaacgtatatgaggtaaaaacaa

SEQ ID NO: 1298 - DNA, 161 bp, Parthenium argentatum
acataacaatatactaattaaattttatatatattacattaattaagtatgatgtcatctggttcaatggtacgaccgatsaccgatctgaccattaaaccagtagtgtggtccgattagtccacgtttgattttataagttaaacgagttatttttacat

SEQ ID NO: 1299 - DNA, 161 bp, Parthenium argentatum
aaaccagtagtgtggtccgattagtccacgtttgattttataagttaaacgagttatttttacattggatatgataagagktttgaagttgagaaaatactagatgatgttaaactattaatggtaatccgagttttgactattatcgatcgattaatgca

SEQ ID NO: 1300 - DNA, 161 bp, Parthenium argentatum
atgttcattggggcatttcgtcgaacaggttaagggcatatgtttgcccttaaacaaactacttgtaatgaattttatctycattgatgaacatgggattcattatatttgttcttactgaattattatctcgttttattgaataaaaattggtgggttag

SEQ ID NO: 1301 - DNA, 161 bp, Parthenium argentatum
actcacagttagccaatgaaccattcatattttacaaacatttctagcttttatatctataaagcaaaaaaataacgcagstttggttttagttattaacagattcgaactgaaaatcatcaatatgaccgaataaaccgaaaactgatttgttaataaca

SEQ ID NO: 1302 - DNA, 161 bp, Parthenium argentatum
tttttgttgaggttaataaccgaacaaaaccgaaccatgcatacccttgtcagtggctatgtttcccgttgcatcgcacgracactcttctagtatagaagaacctataatcggttgtattttatttgcatgggttataagattatccctcatcaatatcg

SEQ ID NO: 1303 - DNA, 161 bp, Parthenium argentatum
ctatgtttcccgttgcatcgcacggacactcttctagtatagaagaacctataatcggttgtattttatttgcatgggttwtaagattatccctcatcaatatcgtatttctcggaagacttaatccagaaaccttgaccagcctacactaaatttttgtg

SEQ ID NO: 1304 - DNA, 161 bp, Parthenium argentatum
tcggaagacttaatccagaaaccttgaccagcctacactaaatttttgtgagccaatgataatcatgcttgtagaaaaatwaaattgaattttatctaaatataagaaacctaattacttatagcaaggtattgatgtaaactacaataatcaaattgttt

SEQ ID NO: 1305 - DNA, 161 bp, Parthenium argentatum
ttatattctatttaaccaaatgaggttttcacacaataaaatgcttctatgtggagtaattgaaatctgtaaaaagcaaargtaccaggcatcatctccctaataaacaaaggtattgatgagatggaagcgaccatcttgggagactgattacatttgat

SEQ ID NO: 1306 - DNA, 161 bp, Parthenium argentatum
agtttataacaaagatcaacaaaaagaggtgtttgattcatctcttgccatcctgatcacttcaaccttcggtgccagtgrttttacctgataaccatataaaacaaacttatattaactcataattaatctatgtaagtgtatctaaagtctaaatcgtt

SEQ ID NO: 1307 - DNA, 161 bp, Parthenium argentatum
tcctgatcacttcaaccttcggtgccagtgattttacctgataaccatataaaacaaacttatattaactcataattaatytatgtaagtgtatctaaagtctaaatcgttcataactcaaccaaattcatgcgaaaaccatgcatagcatacgcccctgc

SEQ ID NO: 1308 - DNA, 161 bp, Parthenium argentatum
cttggcttactcttaaaattgttgaatggtgagctggcatggtctacacgtcgggaagttctaaaggtatgttattaagtkctttctctggccttttgggtaaataggtttattctaagactttctggaagtgatgaataggttcttggcataatgggtgc

SEQ ID NO: 1309 - DNA, 161 bp, Parthenium argentatum
gtgatggtactcgcgcggccagtgatgcgggcccacacattcagtccagcgatgagttgatggatctttggccatcatttkcgacatcggaagattatttttcaactgtaagatttatacagaaaaattaaataaatacggtgtcatagccacttgttttc

SEQ ID NO: 1310 - DNA, 161 bp, Parthenium argentatum
tgtaatacctgattcaacctggtactttacccgtccagttgacaaaaatattaacgtcgtaatgtcagcactacatcaaaycatattggcaacaaaaatcatcttgcttcaataaatataaaaatattaatgaatgccataacacgactttcaaacagaag

SEQ ID NO: 1311 - DNA, 161 bp, Parthenium argentatum
aagttattatgtgtgaaaaaagtcagcttatcattaattctattaaaattgtggcactaatttgaactcctctcaagtgaractcacatgtcagaccccactatgaatgtttttcaatgtgatctgaagccttattgtgtattacagtgtctaaaaatgtt

SEQ ID NO: 1312 - DNA, 161 bp, Parthenium argentatum
cattatatatagtatagatataggattgtaatatataattttgcattatgttatatattttaaggcaacataatacaagtkaaatataagtaagaaaagaaaaataaaaagagtatatatttttaactcctcttcgtagtatatatgaaattaaaaagcta

SEQ ID NO: 1313 - DNA, 161 bp, Parthenium argentatum
aacgaagaagtggaatcatttgctagatgtttaagggtgtgtaaattagttggtttagatattaatcaagattactttccrcatcgggtttgcaggcaatttgggtatgcccaagatattccagcagatatcatacttgttgacgacaatgaagatgcttg

SEQ ID NO: 1314 - DNA, 161 bp, Parthenium argentatum
ggtttagatattaatcaagattactttccacatcgggtttgcaggcaatttgggtatgcccaagatattccagcagatatyatacttgttgacgacaatgaagatgcttgggttgactattctacaccgctgttgaatctagaggtatacattccaccaat

SEQ ID NO: 1315 - DNA, 161 bp, Parthenium argentatum
tatagcaatgatatgcacttttacgttcgctatcagttcataatctggatccttttcctctacagctgtcaagcaaaactktaaaaggcaagaagggtatggtgtattaacagttctcatatttctgcttctatctttctacctgtggcttgacatggggc

SEQ ID NO: 1316 - DNA, 161 bp, Parthenium argentatum
ggggcacggggagatgattacactaaaatgtgttttctttaaatctttctaatcagtaattggagaactaccagcaaataygcagtcagatgaactgaatgattctgaaaagttgaccgaaaaaggatataagactgtaagccagcaggagtatataaaac

SEQ ID NO: 1317 - DNA, 161 bp, Parthenium argentatum
agtacgcgcttaagataaatataatctgattaatattgagaaatttttagagttaacggtgctagattttctataatctgwtgaatttgtaggaaggatcgttctaaagcagttgacattctagtgaaggacttgaaagtgttttctgcgtttaatgaaga

SEQ ID NO: 1318 - DNA, 161 bp, Parthenium argentatum
cattcacagttgtatttccatccatacagcacatcatgacaatcccatttttagaggcctaattggtgcatttttacagcygtaaaccactgcttaacagtcttattttacaaccatataatgctatatattccagccataattctctacataacagccca

SEQ ID NO: 1319 - DNA, 161 bp, Parthenium argentatum
aatcttattgtacatctgttcgtcacaaacaaatatgtaatgttaatctaaatgccaacaatgtaaggtggtagttgacargtttctagagaaaacacacttttaatgggaatgctgccacatcaccaactgcgaaaatccctggtagattgcttcgaaac

SEQ ID NO: 1320 - DNA, 161 bp, Parthenium argentatum
ataacataattctaaaactttaagttgttgtaggtttattgcgagctatggttttttatacggcaagaaaagcaaatattwttgaaaagaaaatgattaaaggtaggtatatgtaatacaatgagttgacgtcaactcgcggattgcgacgagatatcaat

SEQ ID NO: 1321 - DNA, 161 bp, Parthenium argentatum
atatagtgtggagaaaaaagatcaggcttgagaggttcattcaaagatccactgctgaggtcatccttcttctcggagccraactctttcttaatctcaacaccaccagtagtgttcttgcctttgccagtagacccttcaccaacactctttgttagatt

SEQ ID NO: 1322 - DNA, 161 bp, Parthenium argentatum
ccatgtaattcgtgaggaaagtcataaatgcaaaaaagaaaatggctcatacccgtcactactgcctgagtatattctttkgccatctgtactccaagtgacacttaatatacgacctgcatagatatgatgaatgcacaaatgtattaatgacagatata

SEQ ID NO: 1323 - DNA, 161 bp, Parthenium argentatum
gagggattctgtatcacatatcttaatccccattcccattcttcaacactttgatagtgtttcatgtgcacagccagttcyttcagaacaccaggacaccctgccccccaacacactgctttcctcgacacatcctcgtacccttctttcgggtggtcttg

SEQ ID NO: 1324 - DNA, 161 bp, Parthenium argentatum
tctcttatcacaagttctcagtaaggcattgcccttaggtggaatagttgtctagtggctaatcgctctcattttttgtchttacaaaaaataaatggttttctacatttcattatggtgtggtaaacactttacattctttgaacattaatcttatattt

SEQ ID NO: 1325 - DNA, 161 bp, Parthenium argentatum
atatggaagttccttcagttaagataatattacatttcttctacgctgaattaaaaaataaagtaataacttttctctctrttgcatggaatgaacactgatttgatgtaacagggatgtgtcaaggccatgaaatggtttggtaaacaacattttaatgc

SEQ ID NO: 1326 - DNA, 161 bp, Parthenium argentatum
ttagtttgctccgtaaacatgttttggatggcttagtgttatatcgatgcagggttgcagttataacattacttaatttgktaataagattgttaatacacagtaatcagggcttttatattgacttaattcataaactaataattttaattctcttttca

SEQ ID NO: 1327 - DNA, 161 bp, Parthenium argentatum
caacatgttaagagataaaatgtaccccaaattgacccgcacccatatatgggtcgaaatttaaaatcatcacttgtacgytgtgaaccaagtttttctctagaaaaacagtttagcttgttgactgttaaaaaacaaacaatcttgcaccaaattaacac

SEQ ID NO: 1328 - DNA, 161 bp, Parthenium argentatum
aagcaatatctggaaaagatgaatcttgatatacacaaaatgcataccaatttctccatctttcacaaattcaaatcctcraagagcattgatgagacaactccatgattcaaaaaccggaagaaatcattgataactcattgaaggaggggcaaattggg

SEQ ID NO: 1329 - DNA, 161 bp, Parthenium argentatum
aaaatgatcagtgtaacgcacaaaacgcatgatatttttctaaactgcctggtttacatccttgagggatacggtcaaaamatgtaatcttttatattggtctggtttggatgggttgagccgaaacatttttgccaaaaaaaaactttaggacacactgg

SEQ ID NO: 1330 - DNA, 161 bp, Parthenium argentatum
tgtcagcatgtgtgtgttacaccaatcattgttgactttagtttcagtttcactagaaaaatacagggaacgtaaacagtycaaagacactatattggagaactctaaaattagtaaatctaaaataaaaatgtaaggttagaagtggaaattagattttg

SEQ ID NO: 1331 - DNA, 161 bp, Parthenium argentatum
tcttcataggctctcgtgtgtgttcattgatcattagagatgcggccaccatggatctgttactgcattgctttgtttctmatctcaacaactgcccagcaacagcctttcaattaccctactgcaaatctttccaccatatgggccaatactgaatcttt

SEQ ID NO: 1332 - DNA, 161 bp, Parthenium argentatum
aaattaagatcatctgatttaacctcacaagtatacttctacatccataccaatgttaatgccaagcactgaaacgtttcrttgcggccaataatatcattgcgaactgtattaattgctaatcttaaaaaatcatgattctcattgagcaagcaagatgt

SEQ ID NO: 1333 - DNA, 161 bp, Parthenium argentatum
aaacatatagggtcgggttgctagaaacacttttagtacaaaatattaaagctttcttataaatgattagtgtcaaatatsattacaagaactacaatgtttcactaataatctatattttataaagcaacagatttagaagaaggtttttgttggaatca

SEQ ID NO: 1334 - DNA, 161 bp, Parthenium argentatum
tcatagcataaaaactacaaatatataacctaaaaggaaagttcattttcgcataatgaaattgttagaatgaattattaytagaaaaatgtttattactagaaaaatgttaagaaaaaataacaatactatttgaaaacttttgtatttgcttcgggtac

SEQ ID NO: 1335 - DNA, 161 bp, Parthenium argentatum
aatgttaagaaaaaataacaatactatttgaaaacttttgtatttgcttcgggtactcatggtatatgatttcaggtaatrgtattttgtgtcacctaatagcataaccaaagttgtacaagagcccgttttttctttatcaatattatatccagtctcat

SEQ ID NO: 1336 - DNA, 161 bp, Parthenium argentatum
aatactaatctactttttcaactttctagaataaaatgatttaggagacctagtgcattaaaaatacaccgagtgactttygacattaaattatttgaccgtttttagctacttctcttttttatatcacatgtttgacccattagagatacacctaaccc

SEQ ID NO: 1337 - DNA, 161 bp, Parthenium argentatum
ccgtttttagctacttctcttttttatatcacatgtttgacccattagagatacacctaacccgaactgaccctttggttrgtaaataggctctgtagtttacaaatttttgaaggtaatattaataaagctgatatataagtgtgcgtaaccaaagttat

SEQ ID NO: 1338 - DNA, 161 bp, Parthenium argentatum
gcttcgctcgatcagaaatccaaacgtaaaccaactaatccatattttgcttgattttgccatccatattccatagttttyaatgacacatcccgtaatcctgcgagaggcatgcaatgcggcgacacaaccgctacagtgaaggaaatttaactaactaa

SEQ ID NO: 1339 - DNA, 161 bp, Parthenium argentatum
ctcaacatatttggttctttatataaggtccttgaatttattaaacaagtccttgtaaatttataagttcaagtacttgawcatgcaaaaaacgacactcttgttatacatagaatcagaattttgtaattgagtttttatgagttcggaagtcacataaa

SEQ ID NO: 1340 - DNA, 161 bp, Parthenium argentatum
tttagattatattgagattataacttttaatcaaattaacgcaattatttatgttaaaaagatgaacaagaagtttttatkattccctgccagctttgacatgtacttaaaagaacatgtttcaagccaaacccgttttatcccgttacccaatctgcggg

SEQ ID NO: 1341 - DNA, 161 bp, Parthenium argentatum
cattgcagggtttctactccattcagcaacacacgtgactttgtactctggttatggacctcacataatgaagtcaacacragactaaggaaaaccgaagaatctctcaaaaccggtgaccccaagttcccgaaaacaatctggccaatgaaacacctctg

SEQ ID NO: 1342 - DNA, 161 bp, Parthenium argentatum
cacgcatccgagacagaaaaggcaaggctcagaagtagaaaaactaaaaaatatataacatacgtaaaatatattaaaaabataattctaattctaataataaatatatgataatctaactatgaagaatttcaatttcaagaattaattattcttatact

SEQ ID NO: 1343 - DNA, 161 bp, Parthenium argentatum
cctctcaccaccttgccatcgccgtcatccccaccacttccgccgtcgctgctgttcctccccgtccctctctgtcccgtygctgctgttcctcgccgtcagtccccacacccgtcgcgtcccttccacctctcccacaacccatcttcttcaacctcccc

SEQ ID NO: 1344 - DNA, 161 bp, Parthenium argentatum
tgggagcagcccaacaggcttccggaggagaagctggaggagtggtggcatgagaagaagccgtagaacctccattgactrgtggatgccggtgagacaattctttccctccaaccagagaccctgtatgtccaacagacggccgtacagaagattctgtc

SEQ ID NO: 1345 - DNA, 161 bp, Parthenium argentatum
attaaaaattcagaaagtgacaagattctaaataatagtaaattacaaatgtttgaactggtatacagcaataaaattatrttgtcctttcatggtctgtggtactggccttgtttttacccatgcgaatttttgttctttctgtggaaagcatttggcct

SEQ ID NO: 1346 - DNA, 161 bp, Parthenium argentatum
ctaaaaacgcttacaaaatctcaatcaagaagtaaagaaaaaaggtaaactaaggggaacacatgtttgtgttgtatctgytaatgtgtgtatctacctcctttgttgtttgcataaaacacgtcaaagtttaagtacggtgaaaaagaagtcgataaatc

SEQ ID NO: 1347 - DNA, 161 bp, Parthenium argentatum
tgtttgcataaaacacgtcaaagtttaagtacggtgaaaaagaagtcgataaatccaagttatatgtaaagagaaagggtrgtcgaatcatttccggctagaaagatagatcccggaaataatggccacccctgccaccgccactccaactgtcgacaaaa

SEQ ID NO: 1348 - DNA, 161 bp, Parthenium argentatum
tgctccaaaaattcatcttagtttattatgaaatgttttcttgatttgctattaatctttttacctatgttatgcagatgrcgcttgtcaccacagacacgagttgtgagtcagtggtgacaagcggtcaacatcacttgagccctcaacatccaccaagg

SEQ ID NO: 1349 - DNA, 161 bp, Parthenium argentatum
cagctttattctccgacaaatatatgtgtgtgaataatatatattcattaaaagaaaacataatgatcgtactgtttaccrcagagactgaagtaggttaagtgaataaaaagtaaaaaatgatgctaacaacgttggttccccgctttcgtggcttccag

SEQ ID NO: 1350 - DNA, 161 bp, Parthenium argentatum
catacgaccacagatactacgaaaaagtacaatcaaaccacttttcacatgtctgcaccgcaccaatagagtcagaaaacragctttcggttttaacaggtgcatgtttacaagttaagggccatgggttcaaaaaggtcctcttcttacgccttcggttc

SEQ ID NO: 1351 - DNA, 161 bp, Parthenium argentatum
attattatagttactaaatttgttaattataaagttgaaaataccccatatggcaaagaaacttaataagaattattttawtaattattatatacagtttataatttgacggatattacattaattcagtaaagaggagataacaaagtgaagtttccttt

SEQ ID NO: 1352 - DNA, 161 bp, Parthenium argentatum
ggatattacattaattcagtaaagaggagataacaaagtgaagtttccttttgtatgaccagaaaggacctacgaaagatrcaagaaactgcttatagataacatacatatctcataaaagactgtcaaatatcacatacataaaagcaacacatgctaga

SEQ ID NO: 1353 - DNA, 161 bp, Parthenium argentatum
aagccagaaaatatatgaaggggtgaaatatataatttaactgtagttttctttttgggtccctgttgaagggattggggwatgaattgtggtgctccacttttattcattttctcatgcctaaaaccctgttatttaaaaggattaatgttagtattatc

SEQ ID NO: 1354 - DNA, 161 bp, Parthenium argentatum
caagacgactcgccaccttgtttaattaaactggtcaacccaccaaccctttaacccattaattacaacccaccaaccccrattatcacgtttaaaacatgatcactacccatcaatccgtttgacacatttacataaaccggttcgatcatgttcgggtt

SEQ ID NO: 1355 - DNA, 161 bp, Parthenium argentatum
aacataaactgtatgatcaacagtgaacctaataagtcccagctatatgctgtgtttttgttcataatttgcaagtcttawgttctgtttattgtttccagaatctttcagcaattacttcagcaactacggagaaataacagattctgttataatgatgg

SEQ ID NO: 1356 - DNA, 161 bp, Parthenium argentatum
gaaccagctccatgaacccacattgccgagttctcattctgggaaaaaaaaaccaagataagacaaaagggacacggcacrtacatgttgagcaaagagtcgaacaagtgcatgccaaaacaggcaacttttggtatgaaacgagctgagttgacacgacg

SEQ ID NO: 1357 - DNA, 161 bp, Parthenium argentatum
acatgtctatttaaaaaaaaatacatataaaaatgtctgtatataaatataaaactgaaattacatataaaatctcaatcygactaatcctgactaatccttattaatcccaactagcgcttagcaattcttacaacactggcagcaaccttaccgttgct

SEQ ID NO: 1358 - DNA, 161 bp, Parthenium argentatum
taaagtcttggttcagagttttcagaacatggctgcaaggcgggttgcagattaggacctgtcatccaccgtccccgccaygccatcgtcatcagtcgtcggaaatgatttgtattaaatgtcatacataatcacttttggaatggaaaaacggtactgga

SEQ ID NO: 1359 - DNA, 161 bp, Parthenium argentatum
tctccttcctcctgttttctggtggaagaagagacagatcttttagcctccgggcagcttgcgtacccaactgctccttcrgaaaccttccatcttcagccaagacacaaaattccataggaacgtagtttggccttttttcattccccaattgtaaacaa

SEQ ID NO: 1360 - DNA, 161 bp, Parthenium argentatum
aataacaatattgtttcctataggctatcgaaaatcctgaaaagatgacacctgctatgaagaaattcatcgagtattcgragcttgaatatcaaaggtacgtacctgcatggaatgtttatatacacattcttttatttttatgcttatttaatattttg

SEQ ID NO: 1361 - DNA, 161 bp, Parthenium argentatum
gtacatatttataaaaattgtttaatagtttatcataacacatctaaaatttatttttctaaacagaaggtttaaaaattktagagatataggggtgcaaactaaaaaacgaaggcactgatgaaactcagatatagctcatagctgcaccaaataaaagt

SEQ ID NO: 1362 - DNA, 161 bp, Parthenium argentatum
cttgtcgactggtaatctggtgcgtgttccaaacttctgctttgttatttcttataatccaagatgaatctacccacatamatgtcgttttatcagaatttaacgattgaaatgtcatcgaaatgtaaaatccttattcacttgactgttgatagacactt

SEQ ID NO: 1363 - DNA, 161 bp, Parthenium argentatum
ggagatcaagcccttaggtacttgtttcttcaattaataaataattttttttagtaaaagtgtaacatttggggaaaactkaagatatttatattttttattaagattaaatattaacttcttgaaaaccaaaaatttagctactcaaatttatatttaaa

SEQ ID NO: 1364 - DNA, 161 bp, Parthenium argentatum
ttggagcatagatgttaatcatgcccaacttgttacaaataaaactaagacacatggcgaccgctcctcctaaactagaamattgttgatcatgttgcatcattaattgctgtagtgtcattggactttaatacttgggcatttcacccaatgataaactc

SEQ ID NO: 1365 - DNA, 161 bp, Parthenium argentatum
ttttttactaccttaactattatttttactacaccatatttttcatgttacttggtgttaataagtatatatttgcatagycatgagctgagagaagggcaagaaagtgaaaagaaaacaattggattcctagaggtatcgtatatttgtattacctaaaa

SEQ ID NO: 1366 - DNA, 161 bp, Parthenium argentatum
ttttttttttttttttcatttttagtcaggtgtgaatggctcaacagcaacttttccagatgcaactggaagagcttttamaacattttcttctcagttaggttcctctgctgcggatatgaaccacaatgatgcaataggtgtgtgcttcagttttctgc

SEQ ID NO: 1367 - DNA, 161 bp, Parthenium argentatum
tcttcgtacacaatgcaaatttcgtaaacatctgctttggggatgttgtgtattttggacgatgggaaactacttatgttrcttccgtttaaccaacaacttgtcatatacgacatgatcaaagattcatttacggaggtaaagaccttgacgagttttgt

SEQ ID NO: 1368 - DNA, 161 bp, Parthenium argentatum
gtcatatacgacatgatcaaagattcatttacggaggtaaagaccttgacgagttttgtccacaaagggaggttgcaattrttagagtatgtcgagagttcgatttcaccatcagatatatgttaggtttccatatgatccttttgaattccgtggttttt

SEQ ID NO: 1369 - DNA, 161 bp, Parthenium argentatum
tccatatattcaaatattttccttttttcttcaatataatcgtccaattaaataataaataccatcatcttttagattaayagtccaatcagaattctaaaacaattctatcataatcactaaatccataaatcacaaattactaggggtctgttatgtta

SEQ ID NO: 1370 - DNA, 161 bp, Parthenium argentatum
aggggtctgttatgttacatatatatatacaacttcaaggactcattataaacattctataacttaaatactatcttcaamtaccctaaaaacccaaattgtctccataattaagacgatcatattcatcgattcatctctatgaatcttcttaaccttca

SEQ ID NO: 1371 - DNA, 161 bp, Parthenium argentatum
caaaaaaacaaggtgtccgggcaccccggcccctacaaagcttaaccaatgattacaatgaaacctttaacatcacctgayttcttatatcaaattctactagcacctttttagtttgcttgcaatttttaccgaccttcagcatcctacaaagaagttaa

SEQ ID NO: 1372 - DNA, 161 bp, Parthenium argentatum
aacggaattacataatcaacaacaacctcactctctataaaatccttcactttcgatttatgcagctctgcatctgcatcwatagcctccaaatcaggaaaaacagcaatcataccgattgagtaccccttggccatttcatgagataaactctcaccaac

SEQ ID NO: 1373 - DNA, 161 bp, Parthenium argentatum
tcattttcaaccaaatcctcctttaacttcaataacgtaaccctcatcacagatcctgccttcagcgggtcgcgactaccrtcagatatccagtcaacaatcacaaagtcatcaagtagcggttgtgtattttgtaggacccttaggtgctctggatgttg

SEQ ID NO: 1374 - DNA, 161 bp, Parthenium argentatum
gaactgaatctacgtcttttttcccgaattccagaatgatctttgatacatgcaacactgcatccgtgtttgtttccaccrcaaaaaagcttgatttcaaagattcttgaaattcatcggccatttgcaagtttaaatcacccatttccaagtgaactaga

SEQ ID NO: 1375 - DNA, 161 bp, Parthenium argentatum
catgattaagaatagactttttttatattcaattttaactcaagtttgaaaagaatgattgcatgttaatcttgggttaadaattaagcctcgcaatgaggaagtggtatacatgtttgttttatagttttctacaagccaaacagataatgaccaaactc

SEQ ID NO: 1376 - DNA, 161 bp, Parthenium argentatum
ggaggatctgcaacaatgtttagacacttcactgcttaaatttggcttattaatgaaatggacatatgtggcaattttcarcaattaccaataaatatgtcaatttgggttacgtattacctctaacaggtcacaaggactaagctacatattttactaaa

SEQ ID NO: 1377 - DNA, 161 bp, Parthenium argentatum
ttcgccagagttttgtcaacttcttcgtaggacccaataacagaaagatcaagaatccgacccaaattttctgattccaaraatacttcacaatgatgacccgaaaccagctctctgtgagcagcattttcatcagatgaatgcataacgtgtgagctttg

SEQ ID NO: 1378 - DNA, 161 bp, Parthenium argentatum
ttaatactaaccgtaactacctaagtttccagctataagcatcaaccaatcaacaataattaaaacgctagtaaacgcaaraaagttaccaatacgattaagaaaagctaactggttcaaatacaaataactgttgaactaaatcaacacaagtagtcaag

SEQ ID NO: 1379 - DNA, 161 bp, Parthenium argentatum
ataattaaaacgctagtaaacgcaaaaaagttaccaatacgattaagaaaagctaactggttcaaatacaaataactgttkaactaaatcaacacaagtagtcaagatatactagttcgtaacagcaaagaataactgaaaataagaattataaactgaaa

SEQ ID NO: 1380 - DNA, 161 bp, Parthenium argentatum
agcaatgtgcgggtaactacggctctagttacgacaaatttagtggtttaaaaaaacaattatgacattataaatttaaayatatgaaaggtagagtaccttaaaagtactaaaaatttatatgtaaaattgttctattcagtgtttgtgacaatagtgtg

SEQ ID NO: 1381 - DNA, 161 bp, Parthenium argentatum
gtgtacctatgatgaatgaaatgttcggaatgatggatggctagacacctgttgtggagaaaagcccaaagcgttaccatyccaccttacccaagcatgcaccatacaccatgccaacatcgtgaaaggggattttgaggtggggtccatcccatttcaac

SEQ ID NO: 1382 - DNA, 161 bp, Parthenium argentatum
ttacaccacccactacttttataactttgaaaatcactcgaaatatagagtccataaaacctcttaagttgctatattaayagaagttgaaacttggaatactactactgaaatcgcgtatttctattcatcatatatttgtgaaaaaaaagtacaaggcg

SEQ ID NO: 1383 - DNA, 161 bp, Parthenium argentatum
ctttaatgattttatataacttgaaaatgtttgtttgtgagttgcagattaaagatggtgtttgggattagtgaaataatmtgtttttaataggaaaaacgcgtaaaattcgtacattttgtgtttacgttgtgttaaattgatgaattacgttaggcttt

SEQ ID NO: 1384 - DNA, 161 bp, Parthenium argentatum
cacatgtaaagattaaggagaatagaactttgacaatcaaaaattatagtttatggaagggagaaaatagagaaagtatgycatacttcatcagatataccaaatgtacgtgttctcttcaaagcgtgttcagaatcagctgtttgataatctacagctgg

SEQ ID NO: 1385 - DNA, 161 bp, Parthenium argentatum
attcgtagcattctacatatcattttagaaatttctgcagaaagaaaacaagacctatacttcattttgtgaccgctttcktggttttaagtagaaagttagcgggttgagttttactcagtgtagtttctaaatagatttaattatcttttgtttgttgt

SEQ ID NO: 1386 - DNA, 161 bp, Parthenium argentatum
cgttcgcatcaactcccgatcacactgagggggagtattagcatatatggcaacatataaattgtatttaatgtaataatktgaatatattagttgataggaaagtccattagatgacaactgtatttcctgatgtcccttcttgattggagtcttctcat

SEQ ID NO: 1387 - DNA, 161 bp, Parthenium argentatum
attaatcggtaaattgcatgtttcaaatcctttccgaaatatcatattttctgctttcccgcatgttcttctacttaagcyaatgcgttttgaatatgactgcaagtgggaaaacaataaaagtaagtaccatttgttccatccttttggagtttacttga

SEQ ID NO: 1388 - DNA, 161 bp, Parthenium argentatum
ctccacattccatttggtcttggcatcgtgcagtcttcggttaacttaagcatgatgaaatggctatcttgcactgatgaygtgtgtcttataacccataattaattagtacttaatgattacgtgcgtgccatgacccataattaattagtacttagcaa

SEQ ID NO: 1389 - DNA, 161 bp, Parthenium argentatum
aatgaaagcttaatatataagttaaactacagcttacataggttaatacatggaaacaaaacatcaaaatgtcaacccaakttaccgtgtgtcgttgttatgcctagccaaacatctaaccatcatgcattacatcatatatataaaacagtgtgatcaaa

SEQ ID NO: 1390 - DNA, 161 bp, Parthenium argentatum
ttagcttaaaaggaacaatgccaaatgggtgttaaagccttctaatgtgtaaaaagtcgtaaacaatattattcaaaacamtagattattatagaaaccatataattgtgtaattatatatgacatacaaattattactaaaaatcttaacatgaacaaaa

SEQ ID NO: 1391 - DNA, 161 bp, Parthenium argentatum
gattattatagaaaccatataattgtgtaattatatatgacatacaaattattactaaaaatcttaacatgaacaaaaagygtttctgattaacctgacccagccaaacaaaccaaaaaacgcggcccaaaccaacccagaaaacaccattttgatccatt

SEQ ID NO: 1392 - DNA, 161 bp, Parthenium argentatum
cccgcttacccgcccttttttgattaaaaaaaatacatacattcttattcaggtatgcagagcagcttgttggcacttgcrttagcgaataacttctttaaagatccgctagtgagcattcctccagcaatatcagtaagttgaattttatacattttgta

SEQ ID NO: 1393 - DNA, 161 bp, Parthenium argentatum
atgggaatggattatactttctaacacaaccttaaactcatatgcttaattcaaaaccggctaaataactacctcttgatmttgatgaagtaaaacagttatctaaagctcaaaaaaagtggttgttttgtgttttttctgacattttttttttgtcttaa

SEQ ID NO: 1394 - DNA, 161 bp, Parthenium argentatum
ccccttgtttatagttttagcatgtaaatgtgagaaccaggtagccttgtttcatgtatcggtacgatcaagctgtacagkttttagtgagctcgagtgtttctgttaacgtgttaatgttgtgggtccatatggtttgctctggagaactctcctttttt

SEQ ID NO: 1395 - DNA, 161 bp, Parthenium argentatum
gcccgattggtgcatgtaccccttgtcttttggctatcaacgccaccacatgatgcatgaataaccttccgccgttttaaygttattttcacgaaattagtaaaataacgttaaaattagggcgattttacttttgcccccaagggcccacacatatatac

SEQ ID NO: 1396 - DNA, 161 bp, Parthenium argentatum
gttttaacgttattttcacgaaattagtaaaataacgttaaaattagggcgattttacttttgcccccaagggcccacacrtatatacagatatatctgaaataaaaccttaaatgttttttatatataaacatgaacctcaaataaaaccttaataaata

SEQ ID NO: 1397 - DNA, 161 bp, Parthenium argentatum
taatcgaaatcaagagagctagaatcttcacttctacagttctatagattcaaggttctattatagataaaacgtaattawagtcttgtattaattatgtctaaacttcgaatcctacaccataccatcttgcctttccgccatacgtaagattggctaaa

SEQ ID NO: 1398 - DNA, 161 bp, Parthenium argentatum
gtcggtttgataataaaatccaccttttcctccaaaataaagtattcttggatgaaagatgcatctgttgaagagcataasgattgcttcaatagatatcctaacaagaaaaacaaactacaaatccttcatgtacctcttgtatgttactacgcacagac

SEQ ID NO: 1399 - DNA, 161 bp, Parthenium argentatum
gggatccttagcttctcatatagctcgtgaggcttccctacgatattatagctatatgaacctagtgaattttcgtcaatkccccaatgtgaaaccagatactgaatctgcataaaacaagacaccaagaaagaaatttttttgagggtctagtcatttaa

SEQ ID NO: 1400 - DNA, 161 bp, Parthenium argentatum
ccaggttcagaggtgggtctgccggactggccggtttgactggtagaattgattgttttatttttcagaaatattagttcrtgaaaatttaactgataaagatggtttatgatcataatacatatacataactacatactcaatacatgataattgataaa

SEQ ID NO: 1401 - DNA, 161 bp, Parthenium argentatum
aattcatattgcgcggaaattaaaaccccaactgtttgattaatgtgtccagtgagagtttctgatggcttttgatgtcamtgaataagcatagtgctaagaatcagctttcctgtcatcaagttttaattaacttatataaagatgttacaaaagcaatt

SEQ ID NO: 1402 - DNA, 161 bp, Parthenium argentatum
gctcattgtacaattttactctacagtggtcgatttcaaaaaaatgcacgcatcatgcattcatgcgagcgcatcaggagsgcattacgcgatttagagcgcatcatcctcgcatcacgtaatagctgcacatcgcatcacctgatgcgatctcatcagag

SEQ ID NO: 1403 - DNA, 161 bp, Parthenium argentatum
tataggattttaggatctatgggttctgatcacttgatctttggtacgtcttgagcccattaagctcgacacatctaagawttcagatggttagtcgagtcaatttgacttgtttattcccatggttgaaatggatattgcagagcagagctgtccttttt

SEQ ID NO: 1404 - DNA, 161 bp, Parthenium argentatum
gaatatagtcattgaaataaaaatattgtaactatatctgacatttaaattatatataaaaaaaatctaattttttttttkgacaaatgatatttggacgtatctcgctttgacctgttatccagttcattcatttaccatctctattaccataaccctgc

SEQ ID NO: 1405 - DNA, 161 bp, Parthenium argentatum
ctcaaaaaccatgagggcttttatactatagcagccttattcttggtgcttataacatatgaagtaaacttattcgtaaasagagttgtatatatataattactgattaccgacaatcgggctatcgcgaccttttttaaaatcatcccatcctctgaccc

SEQ ID NO: 1406 - DNA, 161 bp, Parthenium argentatum
ggtatggagctggtgaaggcagggtagaattttcaagtggagaaagttccggatctagcagtgggaaaatggaccccactmacggtctacaaattgttgggatgagtgccaccttgcccaatgttggtgcagttgctgactggcttcaagtaagttaaaag

SEQ ID NO: 1407 - DNA, 161 bp, Parthenium argentatum
ctgactggcttcaagtaagttaaaagaaaacattataatttttggtttactataagctgattgttgatacagaattaatawctttcaggcagcactataccagacagattttcgacctgttccccttgaggagtatattaaagtgggtaactcaatttata

SEQ ID NO: 1408 - DNA, 161 bp, Parthenium argentatum
gttagaaggtttgtaaaataaacaagctggtagctactatgttaatccttccaaaattctaatttcataaacatgtgtachataactaaagggagataaaagtcattgaaaattttggggtaaaaaccaaaaatcaattacaacaatcagcttggcataca

SEQ ID NO: 1409 - DNA, 161 bp, Parthenium argentatum
attgatcactgataattgagagtacatgaaagaaagcaacaaccaagactcctataaataacaaagcaacaaacggctacmtcctaataactagtaagatccaaaatacccggacaactcacaacagcctcaaacggctttattgaattcaaagtaacaac

SEQ ID NO: 1410 - DNA, 161 bp, Parthenium argentatum
gacctcttttcaaactaagcacgaacagcttcaacgattctcgaaaagtaaaactgtgtggtagtaagacccctctttctkattttccagccaactttttgtaacgcgcgttccacatcagcttctgagtgaagatatgctcttgttgcctttgaaggtcc

SEQ ID NO: 1411 - DNA, 161 bp, Parthenium argentatum
gaatctcctaattgtctattgaacatctcaaaataaattataccaattaccatccatcttcaaatgtagacctacagaacwgaagctaaagccactcaactccttgttactaaagggtttgacttccgtgggaaacaaggatcagtgtccagaattgcaag

SEQ ID NO: 1412 - DNA, 161 bp, Parthenium argentatum
aaatacttctcaagacttgaaaaatatcatatttgcctaacaaaaaaacataatatcaaatatacccatttttatatttahgacatatgtacccctccgtttatctaagtatttagattattagagtttgaagtgtaatgagaaggaaaagtgtatgctag

SEQ ID NO: 1413 - DNA, 161 bp, Parthenium argentatum
ccacccaaaccaagcccgggaaataaaggtgcaccagtccccacaccacctaacccaaccccttcattctgaccagcaccwtgggagggagtattagctgtattagccgttccagctccaggtgcatcagtagtcggcggtggagcagaaccacgcaccat

SEQ ID NO: 1414 - DNA, 161 bp, Parthenium argentatum
ttgatataaagttacaaattttgaacataaagtgtttttggtcaacccatcccaaccagctttttacttgtaccaaacctytaaccgttaaccaaccagcccattttgccacctctaaattcagtgacgtactaatgctcaacagtctacatctacactac

SEQ ID NO: 1415 - DNA, 161 bp, Parthenium argentatum
ttgtaccaaacctttaaccgttaaccaaccagcccattttgccacctctaaattcagtgacgtactaatgctcaacagtckacatctacactacagtacacaatgttaaaaagatgttaggctatatgtttagagaaaacttaccattaagataaagagac

SEQ ID NO: 1416 - DNA, 161 bp, Parthenium argentatum
aagaaaataggcaaaaacaaaatacctatatgcaggaaaaagtaccttggcttggaagagaggtgtacgtttgcagctccrataatctttcctttttatcattctttggtcataagtggcaaagcagagctctcatggagctagtcaattgttgggaccaa

SEQ ID NO: 1417 - DNA, 161 bp, Parthenium argentatum
ccctggccagctcagattaggtgtagcgattcgaaagctctggcagggtgcaggcatggcccaagcccctcagcggggcckggctaatccaaaacttgcatcagattgctgctgctgagactgcaatgccatgtcatcaagaaacattatttgcaaaataa

SEQ ID NO: 1418 - DNA, 161 bp, Parthenium argentatum
ggggctgaggagggtaagatgtagacaaccttacctctaccccatgggaatagagaggctacttccagtgagacctctggytcgatataattttgcacaaaaataatatattttattgtcagtgcttccagaacagattcggggaacaaatattacaattc

SEQ ID NO: 1419 - DNA, 161 bp, Parthenium argentatum
aatgcatattggcttcgtccatcctgcaagtaaaacccattagaaatccatgcaacaaaagttttagaattaaaaaaaatwaatagataacacaacgaaaattggtaattacctggaatcaacctggggatgtttctgcagagaattggttccctgaaaac

SEQ ID NO: 1420 - DNA, 161 bp, Parthenium argentatum
tgctggacgtctgtttcttaccttttttgctttgattgaagctaaacaagcgtagataataagggttattttagttaaatmaactcgcatttcatatttttatgcggtggtgtgtgtaatgtaggatgactttggatgagagatcaggacacactatgtac

SEQ ID NO: 1421 - DNA, 161 bp, Parthenium argentatum
aattttgacccgttatcaatttggtttgtgttcttaaacaagtcatataaattagctaaaaaaagtcaaatgaaccaaacrggtgatataaattagctaaaaatcaaatggaccaaacaggtcaaacaagtttaaagttgttgaaactattatcgtaaata

SEQ ID NO: 1422 - DNA, 161 bp, Parthenium argentatum
aattagctaaaaatcaaatggaccaaacaggtcaaacaagtttaaagttgttgaaactattatcgtaaatatatagtttgygtatcataactaacacatttattacttataatctctagaagaatggacaaaaaatgttacctacacaacatttactaaaa

SEQ ID NO: 1423 - DNA, 161 bp, Parthenium argentatum
acccacccaaacccattttgacccggtacacaacttgcccatcctgataccatttctttagttagcatacaaattcagcaytagattggaagggagttcaaaagttcttacggatcgaagctggtctacttccacattaagagttttcttaaggtctgaaa

SEQ ID NO: 1424 - DNA, 161 bp, Parthenium argentatum
atcaatttggatcgccgcataaaacctcgggaggagacaatcggccctgccttgtttgttcttatgaaaataaaatgaaakaaaagtcgagaactattctgatcgcactaagtgttacacctccgattatgagtgtaagtgtgagtgagctgcgtaatgaa

SEQ ID NO: 1425 - DNA, 161 bp, Parthenium argentatum
catgttgaaaactgcttaagagatggtaatatacacaaaggtaatatagatgatgtagtccttgttggtgggtcaactcgmattcctaaggttcgcgaaatgttaagggaattgtttgattggaaaccactttgccagaacattaatgctgatgaagcagt

SEQ ID NO: 1426 - DNA, 161 bp, Parthenium argentatum
gttcgcgaaatgttaagggaattgtttgattggaaaccactttgccagaacattaatgctgatgaagcagttgcttatggygcagcagtgttggctgcgaacttgtgtggtaatgggaataacactgtgaaggatttggtacttatagatgtgaccccttt

SEQ ID NO: 1427 - DNA, 161 bp, Parthenium argentatum
ttcttataacttgttgattcatgtatctctttttggcatcatagctaagcttgaattttcataaattcacagtctacattraatggaaatgttatcacaatccaaacaaaaaactaacaggtaatgaacctaatcacatatctagtgacttttgctatcca

SEQ ID NO: 1428 - DNA, 161 bp, Parthenium argentatum
aattattgacttttaactgctatgaaatatgcagttacctttatttttgatttagggtgcaaatgttgaagatttcatgtraatcaaaaaccttgaatcacttctttccttattttttttagttcaaattgtagattctatttattttatacccttcatat

SEQ ID NO: 1429 - DNA, 161 bp, Parthenium argentatum
tcatgtatacaaaaaccacctcgaatggtgtacacgagcttgtccgtcacatcatacggattgtatgatagggcgaaaacyggtcatacgggccgtataactttgtaagtcacatgagtcatttctttgttagtcaaagacgtcatactggtcgtttgatt

SEQ ID NO: 1430 - DNA, 161 bp, Parthenium argentatum
aaaacgagccatgcacaactctaagattctaaatagtaagaaacttcaaaagccactatgacaaagtcggataggtcggtwcgaatattcattgcaacaaaaataaattaaaaccaaaagtaatttgtaattctttgtggcaagattgagttgtttccact

SEQ ID NO: 1431 - DNA, 161 bp, Parthenium argentatum
taaattaaaaccaaaagtaatttgtaattctttgtggcaagattgagttgtttccacttgttcataacagcagcatacatmaaaaatctgtcgtaacaagaaattttggaaatagaaacaccattaatgatctgattttcttcctcatggtcattgctcaa

SEQ ID NO: 1432 - DNA, 161 bp, Parthenium argentatum
ttgtgctctttacaactatgatatctagacctaaaccatgtttgtatatctggaagcctacttgttataataattttgctwtctatattaatcttttccattccaagtaaagcttctatttgttcttccttatcaatatcatcaagaacaataagcaccct

SEQ ID NO: 1433 - DNA, 161 bp, Parthenium argentatum
atcatcctttcattgttgctttcacactcatctttttctacagtcgaaaattgtggatttaacttctaccaacttcaacamccttccttccttgaggttttatttttatatatgctgtgctgtatctctcctagccctaggtatatttatattatatactc

SEQ ID NO: 1434 - DNA, 161 bp, Parthenium argentatum
tttatatatgctgtgctgtatctctcctagccctaggtatatttatattatatactcaattgggtaaaactatacatgctyaaatgtagcattctttatgttttgcaaatgtaaacatcttacttccccattgatcattttaaaccaacttcaaatttatt

SEQ ID NO: 1435 - DNA, 161 bp, Parthenium argentatum
aaaaatactaaaattttggggttaaaaagttggtatctcaactagagttccaaaatggtcatcatttttttccagaaaacmattaaattgaattggagttcaataaccatcaaagttttcaatcactttaaccattaattagtctcacaaattccctatct

SEQ ID NO: 1436 - DNA, 161 bp, Parthenium argentatum
tatgatattgttaatgaatatttttcttcaattctagggaatatcacgtttttccttttttggtggaatgcgtaaataatrgattgtcttattttacgtgtttatttatgtctttaacttaaatatttatttaaccgttttcaaactcaatgtttaggcaa

SEQ ID NO: 1437 - DNA, 161 bp, Parthenium argentatum
ttaacttaaatatttatttaaccgttttcaaactcaatgtttaggcaatacctgtagaaattacaaactgttaaataaatkttgaacctaaagacataaataaacgtataaattaaggcaattagtgatatgcccgtgttacactaaagagaggaaagact

SEQ ID NO: 1438 - DNA, 161 bp, Parthenium argentatum
aaatcgaagttgaggaactttattagcttcagagaagttttcagttgcaacttggatagtgtcaaaatcaaaccgacgtartatgtgattttcaccttgaatagtatcaaggtggtacatcaaggatttcaaacttatacttccatctacaagttcaacaa

SEQ ID NO: 1439 - DNA, 161 bp, Parthenium argentatum
aattggcattttacatatccgtggattaaggttcattttacaagggcacattgtcgttttttagtttatagagtagaacartaattgtacaatttcaagggtacaatggtaattttacaattttaaggataaaatggtccttttacgaaaaagcaagaaat

SEQ ID NO: 1440 - DNA, 161 bp, Parthenium argentatum
tttcgtgccatttcactcactcgctcaaatacaactttgttgtgatcaaagttctctccttgaaaccttggtagaacctaygaaagatgaaaaaagaaaattttcaacaaaagtatatacagttgaggttatgtttataccaatcaatatgataacacaag

SEQ ID NO: 1441 - DNA, 161 bp, Parthenium argentatum
tggttgtattttggttgttcttagatttagcatagatcaaatcgctgatcccgaggactaaattgctttcatttatccggyaaacatgcatcaaacgatcaacaaagtacaagtaactaaactagctaactaactcactctatactataacacttaacata

SEQ ID NO: 1442 - DNA, 161 bp, Parthenium argentatum
atcaatgacctacattaagagaaacaatttgaccgtcaagcagtgctgtcaaaactgccacgtcgatcagattgggtgccktgtctaagcggatcaggctgaatcccaaacacttttgtccaaaatttctattttttatgtaccaaaaacatcatttttac

SEQ ID NO: 1443 - DNA, 161 bp, Parthenium argentatum
acgagaaacatataaaaacgcatgtccgaataaataaaaagtcatggtaaataatatttttaaaacacaaagtaattaaawacgataaccgaaatacttgtacgccgaaccgtagcgtcaaatcgcgttccccgcgccttcttctccgtttaaacgcgacc

SEQ ID NO: 1444 - DNA, 161 bp, Parthenium argentatum
ttgttcagcctgtaagttgtaggtcgagacccccttcttcttgttaactcattcccctattaaatgttttcatttggtcamcggcccagtgtttttttagaaaatagcgtgcagcccatataatcagaattctgggctaagactgatcagatttggcctgc

SEQ ID NO: 1445 - DNA, 161 bp, Parthenium argentatum
gaatttccaaacttggacaagctctaactattgaagtgaggcttagtaaaccttcatcttcatgagctccgataatcagcrtcagttccttgacatttgataaaataggtagggaattgagcaccaacaatcgctacaacaagaaagaaacaatttcacaa

SEQ ID NO: 1446 - DNA, 161 bp, Parthenium argentatum
agcatcagttccttgacatttgataaaataggtagggaattgagcaccaacaatcgctacaacaagaaagaaacaatttcrcaatatatctattaatggctataaatatactagggatgaattgcgaacctggggataatactcaagaaatgaaaagacct

SEQ ID NO: 1447 - DNA, 161 bp, Parthenium argentatum
ttacttcgtttcctagaataggtccccttgtatcattatatattgtaacattatttgtgaataataattaattgattgagwtctcgtaatatatgatcctaaacatgtgatataagttttatcgtgttattttctgtagatctaaaaatctaaagtaaaaa

SEQ ID NO: 1448 - DNA, 161 bp, Parthenium argentatum
gacccattcataagtaaacgtgcctaaacttccaatttttcatctgggcgttttatccataggtttctatgtagagaaatrtatgcaaccatgacccaactttgtctttctcccttctctgtctataaaaggggcaatggttttaatgtaaaatctaaagt

SEQ ID NO: 1449 - DNA, 161 bp, Parthenium argentatum
agcaaatacggcgctgttcttaactttacttgcattgagatgaggaaccatgagcagcctcaggaggtgcattgtgctcckgagaatcttgtgcagcaagtggcgttggcgacacgagaagcacatgtgttgatcgctggagagaatgcattgcctagata

SEQ ID NO: 1450 - DNA, 161 bp, Parthenium argentatum
gatattaatcaagattactttccacatcgggtttgcaggcaatttgggtatgcccaagatattctagcagatatcatactwgttgacgacaatgaagatgcttgggttgactattctacaccgctgttgaatctagaggtatacattccaccaataaagtt

SEQ ID NO: 1451 - DNA, 161 bp, Parthenium argentatum
tattaaatataataattttatatatttaaagtcatctcacattgttacttaagtcactaactaataatttaatatattatrttttactactatttgttttcaattaactttttcaaattaagaaataaaatatgaaggtggtgaataagagaaggaagaaa

SEQ ID NO: 1452 - DNA, 161 bp, Parthenium argentatum
tctgtttataagcggaagtagaagattaacttactgaaaataccttatttgggtataacttattaatatattatagaaacmtctacttgagatctgcttattgtaacaacttatttcatcctaaaataagcatacacaccatatattctttttttgtaaac

SEQ ID NO: 1453 - DNA, 161 bp, Parthenium argentatum
aaacaagaaaaagaagaatagttgatttatttgaagttatgatgtcttagtgccgcattcattgtatcttttatgttgttyaagaatttgctgggttagtttgataacataagggggagaaggtgttaggatcgggtatcacggctgttcaaatcatttga

SEQ ID NO: 1454 - DNA, 161 bp, Parthenium argentatum
tttccgactccttaaggttagcaccaactcgttttaatccagccttgagctcatcaaaagtaatgtgaccactattatcgktatctatcatctgaaacatttgtttcagcccagctatttcttcttctgataggctctctgctataacctgcatcaaactt

SEQ ID NO: 1455 - DNA, 161 bp, Parthenium argentatum
ttttgccaatgatggatgagatcgatggtgtgttgatccatgttcttgtagacgttgaaaattgtgacttttggtggaackctaacgagcttgattttccatgagactataacaccaaagctcgccccaccgccacctctaatggcccaaaaaagatcttc

SEQ ID NO: 1456 - DNA, 161 bp, Parthenium argentatum
aatcacttcgtttttttttagattttcggtaaaatacttcttttttacaggaatttattatacaaaatttggacatgcatrgaagttttaggaacccaattcaccctggcccatcatcggccaatcggggaattaaccaaacttctaaggatttaataaaa

SEQ ID NO: 1457 - DNA, 161 bp, Parthenium argentatum
gtaacaaagcttcctggggacggagtttattcaggctctacatgcaaacagggtgagattgaagcagtagtcatcgccacwggtgtgcataccttctttggaaaggctgcacatcttgtagattctacaaaccaagtaggccattttcagaaggtatgaaa

SEQ ID NO: 1458 - DNA, 161 bp, Parthenium argentatum
tccttcccagtgaatcgcgatcttctcaccgtttccagcttctatgtttctatccaaacagttatagcagatgtttgtgaytccacccttgaaccactggcaagcacaccaacttgttaaggatggtatacagttgcaagtgaaaaacattaacagttgat

SEQ ID NO: 1459 - DNA, 161 bp, Parthenium argentatum
ggcaagcacaccaacttgttaaggatggtatacagttgcaagtgaaaaacattaacagttgattactgattacctctataytaatatttccttttgtaatatcaagattctcatagtagacctgttgaccccatttcttcttccagtagaagtcggcagcc

SEQ ID NO: 1460 - DNA, 161 bp, Parthenium argentatum
gaacgtctaaactgacctgattacaggatggatggatgtttttactgctagtcatgcttgattacaggtagaggacttagraaagttgcattcatatatgggcaggaataggtattagtaggtttttaaattattttaggttgtatcctgtctaataatcg

SEQ ID NO: 1461 - DNA, 161 bp, Parthenium argentatum
aacactatataattttgttttccaattttcaaaccgaaaacatccggttctgattaaaaccgaaccgaatggaaccaaacygtaatacacaataacttcttcctgtagatgatctgctcgtaaaacccgacgctagagaggaaccgtatctatactacaac

SEQ ID NO: 1462 - DNA, 161 bp, Parthenium argentatum
actataataagttacttagataaaccatgaaatgttatatattgattgtggtgttgctaattagcgttacaagggtgtccktgtatataaagagaactggcttacaatctcgtgtattatacgggctggtaaatgtaatgttctaaataaaaaatttatga

SEQ ID NO: 1463 - DNA, 161 bp, Parthenium argentatum
aagtatatacttcttaggtggttcattatttccactcatgattgtaattttgaatcacatgatcattattctgacaacaasgtcacttagcaacttatgttctatccgagagtatatgtttttaaatatctttgtcagtaaatgcatcttttgtaaaattc

SEQ ID NO: 1464 - DNA, 161 bp, Parthenium argentatum
gcagtaattgtagggagtgatatgagtgtgcagacaaaatttgaaacagaacttagggattttgtagcacagaaaaagatycaacatcgtgttcatttcgttaataaaactcttactgtagccccgtatttagcagcaattgatgtcctagtccaaaactc

SEQ ID NO: 1465 - DNA, 161 bp, Parthenium argentatum
ctatttatagtcatcctcaccacaaagttgtaatacacctgtcaaataaagataagtactatttatgtaaaaacgtaaaamtacaaggacggaaatgacacttaagaaataatacagggtcatttattgacaaactttgattcatacatgcataaaacctt

SEQ ID NO: 1466 - DNA, 161 bp, Parthenium argentatum
atacagggtcatttattgacaaactttgattcatacatgcataaaaccttcataaattcatcaagccaaatcacaaggtgrcattaagcttcacacaaattgtaacgtcgattgcatcagattatccctttctttcctcttttgcttcttctctctctaaa

SEQ ID NO: 1467 - DNA, 161 bp, Parthenium argentatum
ttttgtttccatgttgagaatatggcatgtaaaagcagcaaaatatgtcattgtataggagtttaaaacaatctattgtcwacatgacaaaacagttatcagctgctcgaaatacaaaaaagattcttatatacaatcccttttttgtggtttatgaaaac

SEQ ID NO: 1468 - DNA, 161 bp, Parthenium argentatum
caacaataataagttattgtgtccactaaacgagcaacatcagtttgttgttcctccatctctttctttatcccaccaacwgccacacaacacaagtgtgctttacattcctcccaaatcgacggacacaacaaatctaaccaactctcattacgatctca

SEQ ID NO: 1469 - DNA, 161 bp, Parthenium argentatum
ccctccggtgaccaagtttgccgttaacggtggtctatattttgccactttgtttttgttgtttgatccttcttaaactcwcaaatctcacctgtaacgtagttaaagcaaagtgagagttgtagtaacatcatctattgcttttttccggcaaaaaagga

SEQ ID NO: 1470 - DNA, 161 bp, Parthenium argentatum
aataatcaaatttatcacccatttttaagcaataaaaaagattatacagaaagatagtgcgaatgtattatccaaaagctrtaatacctagttatcttttagaaccaccagcagagcttagatgtcaatttaacttgggatattattcatgtcaaactaat

SEQ ID NO: 1471 - DNA, 161 bp, Parthenium argentatum
tactttgtcttcattttggtccaatttatagctaggattaccaatggtcagcaagcatgatatgtcatcattattgccatkaatgacatcatcaggaccgttgggtgaatcaaagtgtttagggaaaaggtttaagtgaagtttgtggtttaggttaagat

SEQ ID NO: 1472 - DNA, 161 bp, Parthenium argentatum
aacaggtcaaataggtgaaatataaatataattagcttataagggatccggtcaaatgggttcaaagttacccagaatttwttttttttaattcataaaacctgaattattttagaaaaaaatagattattactgtaacagtataatctttataatcatat

SEQ ID NO: 1473 - DNA, 161 bp, Parthenium argentatum
aaaatatcaaaaccaaagaccgatgatgtcccatcattggtttttcttaattcaacttcaagttgcatcttccatgtaacracatgagattgagattgtaatatatcagtttggctaattaggaaactaaaatgcaggatggttatgcctccggtggttcc

SEQ ID NO: 1474 - DNA, 161 bp, Parthenium argentatum
cagatgctcaaccatttctgtaggtagcaaaggatttgtctcctgtaaggaaatacattagtgaaacagaaaccaataaawataataataaaaagacttgaaaacaaagaaaaatgatggtatctacattacaaagtgcttcgggtgaaaaagcactcgag

SEQ ID NO: 1475 - DNA, 161 bp, Parthenium argentatum
gcttgtaaaaataaaaactataaaggttggttttaatgtccgctgggtttagttactttatacacatataattataaccartgttgtagaaatcgcttgacgctagttgggcgtgaggtaccacctaggcttaatcggaattagtcgggcggtgaggtacc

SEQ ID NO: 1476 - DNA, 161 bp, Parthenium argentatum
gcttaatcggaattagtcgggcggtgaggtaccgcctaggccgatttctacaacactgattataacagaatcataaagtcrctaatcaaaaaatttataaccgaatcgttggtttctcaattagttcgttatgttgcttatctgatttgtctactaactcc

SEQ ID NO: 1477 - DNA, 161 bp, Parthenium argentatum
atatgtaccgaattaggaaggagatatatgaattatgaagttatctttattataatgtatgcaactccttttacttaattsgactgtttgtatattaggtaccgtgtctctctatttgccagatggaaacaaagggggatgtatgcagcatgtatgtggat

SEQ ID NO: 1478 - DNA, 161 bp, Parthenium argentatum
aattccctccaagttttggcggtggtggaggtggcggtgaaggcgctacttcacgcagtgcctcatcagaagaaggtccargtgtaatgggagcagaaccagaggcttccggaggagaagctggaggagcagtggcgccagaagaagccagagaatctcca

SEQ ID NO: 1479 - DNA, 161 bp, Parthenium argentatum
tttaaactatcaaattaaagtagcatgtttatgtgttgtcgaacagtggtctattcaactgtcttaactttttaatcagamcacacattcaagcatatgacaggtaatatattgtaacatctctataacagaaatatacattacgtgtggaaaatcaggat

SEQ ID NO: 1480 - DNA, 161 bp, Parthenium argentatum
tatggggtggttacgcggattgttgttggtgggtttttggttggggttcttgtgattgtgaatttggttgggtttttggtkcagagtgtgttttattatgtttgtaagagttttcatcatcaagggattgataagaacgcgttgtatgatcatttgggtgg

SEQ ID NO: 1481 - DNA, 161 bp, Parthenium argentatum
gattggtaaccaggcccgtccgaatatttttgatctcactgtatcaaaaccgtctaatctttatgaagaggttatagaagytgatgagagaattgagcttgttcctgagtccgagaaaacgatttccaactctggtgacttgaatgtggttactggcgttt

SEQ ID NO: 1482 - DNA, 161 bp, Parthenium argentatum
gtgaagcctgttagtgaagaaacgttgaggccgttacttgctggtttgttagagaaagggattaagtgtttagcagttgtsttaatgcattcttatacatatccgcaccatgagctttttgtgaacaatttggctgtgagcatggggttcaagcatgtttc

SEQ ID NO: 1483 - DNA, 161 bp, Parthenium argentatum
acttgtacaaaactgattatatgatccctagattagtcagacaatctgaatcattttatattaaacaatatctacaacttyaaaacagtagaagcagataatcacttccaaaaagcattgccacacacctcttaaaatgattggattatatataaatactt

SEQ ID NO: 1484 - DNA, 161 bp, Parthenium argentatum
tcctcgccctgcagtaaaattgcagatggcaattttgaccagtttacgattgaaaggatagatttagttgtgtttgatttragcatgtcacataaaaaaagttggctaaagtgggtacgaaaaaattagataaagaaggtacagatcaaatgggttgaaat

SEQ ID NO: 1485 - DNA, 161 bp, Parthenium argentatum
aatggtgagaaaaatagcaggaaagagtataatggaggattcagaaagtgagaccattgttgctttagagggcataatatrtcatctttggtcatgtttccacaatagatattgaaattaatttgtgaccatgaaaagaatgctagtttgattttctgctg

SEQ ID NO: 1486 - DNA, 161 bp, Parthenium argentatum
aaagaccttagattgtaaaatttaccgacaaatattctatgtcgattcactgaataaaatacttgcgatatattttatatrtaacccttagattatttaataatccttaattacaatgtaaatgcaaattaaaaaaaaataataataataaaaaaataaat

SEQ ID NO: 1487 - DNA, 161 bp, Parthenium argentatum
atgcaataaacactatttttttggtattataaaatgcaaatgttttgcttggagaaaatcaagataacttaatttttttgytgtttctcaggtggtccatactcaagcaaaggtgattgcagatgaggatgtgatgtataaatacatatcgaaaaatatgc

SEQ ID NO: 1488 - DNA, 161 bp, Parthenium argentatum
tacttgagtttaatattctttttgtttgcttcacaggtttatgtatggtgcaagcaaaatccattaattcatatgagtttyctgggcatctttacttttacagcaggttacttaccatgggtgagttcttgtcaatacatatatctataacttctaaaaat

SEQ ID NO: 1489 - DNA, 161 bp, Parthenium argentatum
atactattcaaagtctacaccataaaactattcatgcctagtgtttactgtgtgggatcagaaacggtcaaatggagacargacagcctgcgggaggagccgagaatgaagcgtttggatatcaggtcttgagcaaatgacactagaaataagtcagctga

SEQ ID NO: 1490 - DNA, 161 bp, Parthenium argentatum
attatcaggatggacacacagggacacctttctgtaagctttcttaaccacagtggtgattatgatctctgtcagtgacayagcttaccaacaactggcggctccaagaatctgtagcaaatataaacattcgagctaaatttatcttatatccaggtatg

SEQ ID NO: 1491 - DNA, 161 bp, Parthenium argentatum
ctaaatttatcttatatccaggtatggtataaaattagcaaaagattacgttaatgggtgcccctcaaagatagaatccasgggtgtataatatttaagaagatttagaaggttatacatacatgttgcagcgttgaaagcaatgcacgcaagttccctcc

SEQ ID NO: 1492 - DNA, 161 bp, Parthenium argentatum
aggattacacacttacaagttacacctagacaggtttctcatacccaccaaaaagattcattaatcagaagtccacgaacygccacatcatccttgcctagcgaagcaccccacggcccaacctcctctctcacaaacctgcaagtagagctgacatggcc

SEQ ID NO: 1493 - DNA, 161 bp, Parthenium argentatum
cgcgtgggtcgatagaaccccttgcagatgctctaatctttgtttccatcatgtttatatcatgggttcatgtgatgcatktttttaataaaactggaaaatgaacatataaagattttacacagctagagcatctcaatgcatatttatttgacgtgtat

SEQ ID NO: 1494 - DNA, 161 bp, Parthenium argentatum
ggggttgacatgctaacatgtgattggttgcccggacgttccgttggcactttattagcttctttcccttatttttcctakattcattctgctccattggcgcttatttaacactaaccacgtcattggcatgttttttccataacattatttttttttaa

SEQ ID NO: 1495 - DNA, 161 bp, Parthenium argentatum
tctttcccttatttttcctatattcattctgctccattggcgcttatttaacactaaccacgtcattggcatgttttttcyataacattatttttttttaaccttcctcacacattcttcttatgacccaagttaatatcaaactcagaagttgattaaac

SEQ ID NO: 1496 - DNA, 161 bp, Parthenium argentatum
atacacaccatgtttcaagttataaccctccaaaaaccaaaactaggtacaacaatactagtctagtagtcttgtctatcygacgaacgcaccactgctcgatagttattgccgctctcctggtgaatccaagaaaggacaaccaagcaagatgaccttgt

SEQ ID NO: 1497 - DNA, 161 bp, Parthenium argentatum
caagatgaccttgtgacaactagctctcttaattctaagttaatttgaggttttacttgcgtacaataaaataaagtcgarctcattcctaattttgaatgtcctgcttttgtatcgcgtataatactacgtatcaggtgggacaaatgtgagccatacaa

SEQ ID NO: 1498 - DNA, 161 bp, Parthenium argentatum
atcaggtgggacaaatgtgagccatacaaagtagaacaccatggcctagctttataaagtaacatatatcacaatataatyttgatctacaacattaatcaagtaccaagagggagtagatctagtttgggtcgcaaagaacataattttctagtacaggg

SEQ ID NO: 1499 - DNA, 161 bp, Parthenium argentatum
acgacaattttgacccgttaacttatgacatacgcgatatcggccaagttttctgatttggtcacagcctttccttcaggragctccaaagaagtataatgcattatcatctctttcaatgtgtacttagtgtttttaatatcatgatcccataaaatgct

SEQ ID NO: 1500 - DNA, 161 bp, Parthenium argentatum
tcgttacatttgggtcctgctgagtaaaagataacatgagggccacaatataaacattgattaatgaagggaaataatgawtattgattacacatggactgcttcaccttttcttgattactggccatcccccaactaccttaattcattggttttggcta

SEQ ID NO: 1501 - DNA, 161 bp, Parthenium argentatum
ggtgcctataacagaaatttgactaaagtcggtcacctattaaggctatttgccattaagcccctacaagacaaagtaaakaagagaggatactggttacaaacatccgagtctcacacctaacagcacaagcaccacatgtcgatgggaaagtcatcacc

SEQ ID NO: 1502 - DNA, 161 bp, Parthenium argentatum
ttagtagagctcctataagagaattaattatagttaagcttaagcctagacgatctgtagatcttttgggatgttagtaaytcatcactgaccgtgagaaacatgacgacagccatccacacaatagttgatgtataatagtttttgaacatgagggtatg

SEQ ID NO: 1503 - DNA, 161 bp, Parthenium argentatum
agtgtatcttgaaactgaaccaccacctcagtcgccaaaaacaatttccctggttttaattaaagtcacaacgtgcgcackcaccttagcttgttcattcagcatatgcataatctcattatgaatagaagctgacagcagacatggttttgcctagcatt

SEQ ID NO: 1504 - DNA, 161 bp, Parthenium argentatum
gacaatagttgcggtcctgctgcaaaatcttgtattacatgggcaacgagtatggatacatatctgaatatgggagtttcktgggtgagtcaagtaaacgttaagttaatctttgtcataaattttgtaatatgtcaatttgtttgtatttattttattta

SEQ ID NO: 1505 - DNA, 161 bp, Parthenium argentatum
attttatttatacacttatataatgtaaattaaattttgcaacccgtgaagttcacgggttataacctagtcatattatawtaaaaaacaattgtaatctggaaattattaatttaatgccaaaaaggatgggggtagcccgtatctcaaaatgctatcgg

SEQ ID NO: 1506 - DNA, 161 bp, Parthenium argentatum
aaactaagagcatgtgcaacaggaacttcatcgtttaccttcatactagacgatcctgctggcaacagctttatagaaaayctgtaactttaactctgttgtattccttttccttttagcaagctatatcattttttctttgtaccataccaaatgcacaa

SEQ ID NO: 1507 - DNA, 161 bp, Parthenium argentatum
tgcacaacacgtgttgcattttgttaaaatatatgacaactttgattttgtaataggtatgttccatccccagatccgtcmttaagcattgatttctacgagcgaactcccgagcaacaagcttcgcttggatatcttgtggaccaatcacaaacgagaga

SEQ ID NO: 1508 - DNA, 161 bp, Parthenium argentatum
tacattctaattggaaagtcttatgacatcatatttacttgggcactctttaggatccttgatacttttaaaattctagcraaattagacaagagtcattatctttcccttaagagttcttttatcatctaccaacttgattacattattaaaatctgttc

SEQ ID NO: 1509 - DNA, 161 bp, Parthenium argentatum
atttaatttcagattttcagtgaacacaaatagtaaaagtgaatgggaaacggtgctttgctctcacattgttctgaaaayaattgttacccataggatggtgatggtgtttattggatgagtatcgttcatacttcataggttgttagattatatggcac

SEQ ID NO: 1510 - DNA, 161 bp, Parthenium argentatum
tcttgctcatgctttaagaaaattgaagtatgtctactttttttatttcccaaactcgtgattaaatggtccgactgtttytaaacttacttttgtccaaatttttgtacaactctgcatcaggaggtacagtgaagcaatcatatattacgaaaaggccc

SEQ ID NO: 1511 - DNA, 161 bp, Parthenium argentatum
attctaataagaaaatttactatctagaaatatcagattacaaagcaatgatgcaaaaggaaagggacgctgtctgaaggwgacagctaaaaaacaacttcttttttttatttattttttatttttttataaatctaaagtttttattcatattcttcaca

SEQ ID NO: 1512 - DNA, 161 bp, Parthenium argentatum
tgtaacatgtaacatccatttaattttataggggttggttgttgattctgctttacaaatggatcagtcttcgggttcggwttttgattacttattcaagctgttgatgattggggattcaggggttggtaaaagctctctgttattgagttttacttctg

SEQ ID NO: 1513 - DNA, 161 bp, Parthenium argentatum
aatcgcttacagttttaggtttgtttagttagtgtatgtgatgagattttttgccaagggaaatggcacgaccacatgtaratcgttggcaattggcatcttgcctagcttgcatgagaacacatatataaaagcgatatacatttgttgaaataaaaggt

SEQ ID NO: 1514 - DNA, 161 bp, Parthenium argentatum
atatatagatagataccaacatataataatactaccatgcgccacacagtctatggcaactattcaacaaattgtaccggktaactatccaagatcttgttgaggcacgtcattatgaaattctagtaaataacaacccaaggtaaacccaccataatacg

SEQ ID NO: 1515 - DNA, 161 bp, Parthenium argentatum
acagtgttgtcattaccaccagaagccagtttctgaaccggttcaaactcgccggacccgattaacgaaccaggctccatygaaggagcccaggtgacggaggttaccccaaccggatgagcttggtctatctttgtggtgtcccacccaccatctgacct

SEQ ID NO: 1516 - DNA, 161 bp, Parthenium argentatum
cacttcatatgggtcaaacaggttgaaagtcgcttaatgtgttattttaatgtatataacctcctaaataacaatattcargaaattatattattaaggagatattatgattcctacaatcatatttgatgcggtaagtatttttagaaaaaattgaaccc

SEQ ID NO: 1517 - DNA, 161 bp, Parthenium argentatum
aatattcaggaaattatattattaaggagatattatgattcctacaatcatatttgatgcggtaagtatttttagaaaaawttgaacccataacagaaaattacagcataattttatcatatttgacacacgaatttcaaacttattttcagtgatattgc

SEQ ID NO: 1518 - DNA, 161 bp, Parthenium argentatum
cacgaatttcaaacttattttcagtgatattgcaatatcatgcacacatttatttgagttatgtttatacatgaccataastaccattattaaaaagaagggttcttgattataagttttggtattctacaactttgccctcattaacgaaggtgataatc

SEQ ID NO: 1519 - DNA, 161 bp, Parthenium argentatum
ctgcaagtagagctgacatggccttaactgatggtttctctcctccacgtcagccacctctcctccaattgtcttccacakttgcatccgcgtgggtcgatagaaccccttgcagatgctctaatctttgtttccatcatgtttatatcatgggttcatgt

SEQ ID NO: 1520 - DNA, 161 bp, Parthenium argentatum
caaaaaaaaaaggtcaactgtgaacaagaactagtgaaaaccagcttcttaaggttgaaccttttgcaattacgaactcgwgttaagtaagattaacacatcaaaattttacgatcttgaaatcttgcatggaccctttaaagtgaaaataaaaaatcaaa

SEQ ID NO: 1521 - DNA, 161 bp, Parthenium argentatum
aaaattttacgatcttgaaatcttgcatggaccctttaaagtgaaaataaaaaatcaaacagcgataaacaagaagaagtracaatctataaaacaacataaatcagaattacctatacgttcaatgacactcttagtaatgtagtttgatagcattttcc

SEQ ID NO: 1522 - DNA, 161 bp, Parthenium argentatum
gcaaaacaagtagaacaaaccaaaaaaaagagtttattgttaagtggaaattgattcatactgattgctaaaataatgttyctacaaagtaaagaatgttggatgatccatttgttttaagacgtaacgataaaacaaagtgtgacaaataaaaaagttaa

SEQ ID NO: 1523 - DNA, 161 bp, Parthenium argentatum
taaaattaaaccgactgagcaaagcaggtagacgtgtaagagaaaacagtgagaggtgttccattatacagtagaaaatascatacaaccaagtaagattatttttaactgcacaaccaattatggataccgtaaaacacatgatagtcaatatatgatag

SEQ ID NO: 1524 - DNA, 161 bp, Parthenium argentatum
tcgaagtaaacgtttgtttggtgtttgtagagactaagacacatattggacatgggtcggagcatttcttctcctgatggrctcctcattaatggccgtggctggaacggttacaccttccaagttgaacatggtgcgtatgtgttagtttctactctatg

SEQ ID NO: 1525 - DNA, 161 bp, Parthenium argentatum
aatacaacagtcaacaaagaatacttcacccgaagcgagatcttccctttatcgataacaagtctagcacccgaaaccacycaataacccggtgattcttgcgggccccttgtcatttccactgtgtccacaaacttcaatagttttggtggttgggctgc

SEQ ID NO: 1526 - DNA, 161 bp, Parthenium argentatum
tattgttttcatgttcttgcctatgcagagtggcttgttaatatgtttacttcaaaaattatgaccatttacgagcgtatrgaagtatagttaaggacctgaagagtccaaactccttttgggcctcgaaaatcaggtattccacaagaagttgatattcc

SEQ ID NO: 1527 - DNA, 161 bp, Parthenium argentatum
actgaatttttatttggcaaagcgcgttagttgtggctaaacaaacatgatgtgataacttaaaaaaaatatatgttagcmtgcttacttcaaagtgctcttctgtgttcatcttttgtttctcttctatccattcttgttgaaattacaaattttttatg

SEQ ID NO: 1528 - DNA, 161 bp, Parthenium argentatum
gggtttgaatgccatccctatgtaagagttactaagaaagtttgatttgatccatttacaatatataaatgataagtctawtagttatcaaggttttacaattctaaaataattcataagggattgcttaaaggttattcatctagcattttttttatatt

SEQ ID NO: 1529 - DNA, 161 bp, Parthenium argentatum
caaaaatcaccaaagagttattttaatgcatacatgtatgcaacctcctaagtcattttatttaagaaattagattagtaktgtaataatttagttttataatcatactttaacacgctaattatttatatatattcacaagatttggacaaaaggtgttc

SEQ ID NO: 1530 - DNA, 161 bp, Parthenium argentatum
taataatttagttttataatcatactttaacacgctaattatttatatatattcacaagatttggacaaaaggtgttcccsgtcaattcaacctgacacataccaatattacccattttgagtgaccgaaaccaatttgcccgttgcccaaccagcttgac

SEQ ID NO: 1531 - DNA, 161 bp, Parthenium argentatum
tacttcatggagcctacgtgtagaagaagtgtattttagggttttgcatgatgtatagaaggttaggggctgtttggcaayttctgaatgggtaagtgctgaaccagtaagaggtctgaaccattaagtgctgaaccagtaagaggtctgaaccattaaga

SEQ ID NO: 1532 - DNA, 161 bp, Parthenium argentatum
agtcaaaattttgtttactgtaaaaattacaccagcttaattttgtttaatcatatattttgttttctaatttaattatcyattttcaataaagttacccataatcatatcagtttcatatatcaaacacgaagtaaggcaactaaaagttagctgagaga

SEQ ID NO: 1533 - DNA, 161 bp, Parthenium argentatum
atctaatatatttataagaacatctttcactgaatacaagagaacattatgtgctaacatgattcacgataatgatgtttktgtattcatttattcagtgaaacatcttgttatatgtaactggttttatagtatttatatactatgaatatatgaaacga

SEQ ID NO: 1534 - DNA, 161 bp, Parthenium argentatum
tggaggcattaaaacgaggagaaaagccaccggtaagttaaaaaatgggtgggtcaggtaacgggtcaaaacgggttggtyggtatgggttgagccacttacacatgtatgcattaaaaatagacttttaataaattcctaattttttttttcgaacaaca

SEQ ID NO: 1535 - DNA, 161 bp, Parthenium argentatum
ccgagtgatgatcaaaactttcataatcgactctttacaacttacaacattaaccttgagcaaatagtaattacatagcakcaggagaacactcaaacttccctttcccggtgacttgatcgtgttcaaggcaagcatatgagcgaacgaaacagagaaaa

SEQ ID NO: 1536 - DNA, 161 bp, Parthenium argentatum
aaagcatagagacggaatcagtttattctctaaaatgccacatatcacaggaggtgaatcatttgcatgaggggctgaaasatgtaagttttattgtagaagtgatcacgcttgcaaataatcttttcctccatctcttttttttgtctcaaacagatatg

SEQ ID NO: 1537 - DNA, 161 bp, Parthenium argentatum
atgggtaattaaatcatataaagtacaaataaatgccaatgaatctgatctatgcatttactgattgcagcaagttgctartatcttgttgtgtgcccgatttttcattttcaagatgttgaaggaaatccatgaccatcggatcggtccatggacatcca

SEQ ID NO: 1538 - DNA, 161 bp, Parthenium argentatum
ttttataaattaggttaaaagctcgtttactacacgagttgaataaaaaaaatattaaatacttagtaatgaagatttttdaattttaaaagatatttattgataagacattatttaaattacgtataagtaagtaattttaataataaaatgactattga

SEQ ID NO: 1539 - DNA, 161 bp, Parthenium argentatum
gggagtcgatggccctgctacttgtcgtcgtacagacagcgggcacacgcgtcgcttctagtccggattctgacttagagrcgtccaaaagtcagctagaagaacgatctggatcacttttacacttaatgggttgactggtcatctagtggaaccttcat

SEQ ID NO: 1540 - DNA, 161 bp, Parthenium argentatum
gtagatgcaagctcaccattgcttttaagctccaaaatgatatcacatcctccaatcaactcacctttataataaagttgkgggaaagtaggccaattcgagaacgtttttaaaccttgtcgaacttcctcatcgctcaaaatgtcaaaagatccaaactt

SEQ ID NO: 1541 - DNA, 161 bp, Parthenium argentatum
gaaaattgaacttgtgttcatatgaagctatgttgcctttggctcatagataggacaattaaagattagaacaatgtttcrgaatcccatgctaaatgaactaacctttggcaagtatggcacgcagcctagccccattgactgatcttgcacagataagt

SEQ ID NO: 1542 - DNA, 161 bp, Parthenium argentatum
tgatctcaatcgatgttatgaaagcctgggagaagcaaagtaatgacaccaaaaacaatcaattatgtctcctttacgatmctccacgttcagcatcagttgctgtttccattttcctggattgtcattttcacctcgtgcttgcccatctaataatagat

SEQ ID NO: 1543 - DNA, 161 bp, Parthenium argentatum
gtgaaagctcattaagaaaaggggcatggctaaatgtttcaccaatgggtatttaacgatgaatctcagtttttttcttarttgtgatggagattctgccacaaatttgacgctaaaactcatgctgaatttcaatatttatttttttagttttactagtt

SEQ ID NO: 1544 - DNA, 161 bp, Parthenium argentatum
ttaacgatgaatctcagtttttttcttaattgtgatggagattctgccacaaatttgacgctaaaactcatgctgaatttyaatatttatttttttagttttactagttttattctatttataaatatttctgaacttacacacacacacacacggacata

SEQ ID NO: 1545 - DNA, 161 bp, Parthenium argentatum
attcgagttgcttgcgaactcacgagccgagccatacctagctcgagcttgggtcgcttacaaccaagcttttttcaaacsagtcacgagttgcgagcttctttgcagatatcatgataaaatagttgaggtgctataggtgtataactatgaaatagaga

SEQ ID NO: 1546 - DNA, 161 bp, Parthenium argentatum
atgtaatggttcttaagagttatttttgttttgttttgttttgttttgttattttataaagttcagtttttttattttttkttttgttttgtaattttataaagttctcagttttttattctttatttggttttgcagctaccggagttcctctgcctcct

SEQ ID NO: 1547 - DNA, 161 bp, Parthenium argentatum
atacttggctgcagtaaaccttcagggtgtaaattttttaaaataaggtccactatcattatggagtcagattaatagccrattaagtggggcatgtattttccgactcatacgtacaccaatgttgtgttgtctaccttcatctaataagtttaaaatta

SEQ ID NO: 1548 - DNA, 161 bp, Parthenium argentatum
tgaatactaattcaacaattcgttttagttttaccttggtattgtgttacccttgatgtaagaaccatgatttttccaaargcatcatctttgtcatacgtgaaaaccatttatttccatgatcatatttcaacaaatgattattttaccaaattatagca

SEQ ID NO: 1549 - DNA, 161 bp, Parthenium argentatum
gtttgctgtgagtgtgcctgtatatgttgcaatgctgacttccattagtgagtttgtttggtgaagctaactcactattasttttcttttagcattattggaacataaaaagtcacatattacacaagttactgtattgtgtaaaattgagttatgatatt

SEQ ID NO: 1550 - DNA, 161 bp, Parthenium argentatum
ttgtttggtgaagctaactcactattagttttcttttagcattattggaacataaaaagtcacatattacacaagttactrtattgtgtaaaattgagttatgatattttcttaactttgtagataataaactatggtttcagcctgaatgcaccggtagt

SEQ ID NO: 1551 - DNA, 161 bp, Parthenium argentatum
caaacggcgcccagtcctcgagcatttcatattgccattgcaattgactgccatatgtttgtttttggagggagacttggytccaaaaggttgttcaactatcaacctttaatcaatattttttctttggatagtaagaaatatatgaaaagtgtttcggt

SEQ ID NO: 1552 - DNA, 161 bp, Parthenium argentatum
tttggtagttgaacaataagcagttagagtaagaaacagtaagtttataagatgtccctcttcctacaaaaaaactacatyttcaaaaaactaaactttatcactacattaatgatatatttacatatttaaattacaaaaaaataatcaactacatatat

SEQ ID NO: 1553 - DNA, 161 bp, Parthenium argentatum
tgatatatttacatatttaaattacaaaaaaataatcaactacatatattaaaactataggtcatatgtgtatattcagtsaatgaatgtatagctagtaaaaatgaatctaataggataaggggtgttgagatgtgttagatatggtagtgaagaagaat

SEQ ID NO: 1554 - DNA, 161 bp, Parthenium argentatum
agatttgttaattcaattaagcaacatacgaattgtgtatacacacatggatcaccattcaataatcaacagcacagtgayttacaatgaaactcaaataacttgtaacaatattgtgtgtaacaatgcctcgagaatccacataactttatagtagtcca

SEQ ID NO: 1555 - DNA, 161 bp, Parthenium argentatum
cacagtgatttacaatgaaactcaaataacttgtaacaatattgtgtgtaacaatgcctcgagaatccacataactttatrgtagtccagattggtagttttgttgatagaaaatattagaaaatgaagttgctacttaacaagttctgtatttgggacat

SEQ ID NO: 1556 - DNA, 161 bp, Parthenium argentatum
tctccaatgcttccaacttccttaaaaatctttactcatccagtctcgtgaagtagagatgttgtaataatatataagatycctataagaacaataaatcaaacaattagaacaaacatatataaggttatgtgtacatataaaatgatttttctctatta

SEQ ID NO: 1557 - DNA, 161 bp, Parthenium argentatum
cctaaaaggtattaaacctgcatttcttgatcatacctgtattttctttcgttcaaatgtttaattcattgatgtcattgytactagagaagtcgtggcaaaggacttgggatggaatcggtgttgatgatgttagtgttcgccattgaaaaccacaaaat

SEQ ID NO: 1558 - DNA, 161 bp, Parthenium argentatum
attgaagtgaggcttagtaaaccttcatcttcatgagctccgataatcagcatcagttccttgacatttgataaaataggyagggaattgagcaccaacaatcgctacaacaagaaagaaacaatttcacaatatatctctattaatggctataaatatac

SEQ ID NO: 1559 - DNA, 161 bp, Parthenium argentatum
tcgtttcgttaattgtttgtaattaccagttaatcgaattaagtggatttcatgttcgttgcctaaggtgtaactcttackggtcacatctcagtcaatagcgttaagttatcgaaaccgtacacataaatccaacatatatatactttataaataaaaga

SEQ ID NO: 1560 - DNA, 161 bp, Parthenium argentatum
taattagagatttagacacaattcaaaaggtcaatctaaatcacgtaatccaacatgttttatgattgtgttgtcgaaccmcttactttaattgtttttatgggtagaatttgtcttgtgattttctaactgatgattttagctataaatttagtctcttt

SEQ ID NO: 1561 - DNA, 161 bp, Parthenium argentatum
ttctctaacgctctactgtaaaaatctatttggtttaatatgcatattatgttgttaaggatttacgttttgttttcttaytgtttgcagatcaaggagtcatttccatactcaatagtaattccttcaccacaaggagaatgtatggtctttccaaaagg

SEQ ID NO: 1562 - DNA, 161 bp, Parthenium argentatum
gttccctcaacatgcctctgccagctcatcagctggcccgttattaacccaacctcagtttattgataaacagcaagttcmttcccaaaatgaatatagtgctgttcccagtggggagaaggtgctgcaagtggattatagtggggtcccacatgatgact

SEQ ID NO: 1563 - DNA, 161 bp, Parthenium argentatum
gatagaattgattgattgtattccatgcaatagggttacaatatatagagataaaccgggccgtgggctcgatattaaaaycctaaatactatattctaatactcccccgcagtcatagcggtagagaatcaaacgatcagactggaaaacaataaaaaaa

SEQ ID NO: 1564 - DNA, 161 bp, Parthenium argentatum
catcacccaatgcgaattcatcaaggcatcatgcgcatcgcgcattatacgctcctgatgtacgcactttaaaaccaaggmgcttaaaaggcgagggctcgagataagcaaagcgcatagcataaacataccatttttacaattttagacatgttataatc

SEQ ID NO: 1565 - DNA, 161 bp, Parthenium argentatum
taggcagattaggctactagcaaaagaatctaaacaacatacgaacagagagcactaaaatattaatattaacgagctatyggttcggttcggctcacaaacaaccctagccatgcctagtaaagtagtaatctataataattataaaattaacctaaatt

SEQ ID NO: 1566 - DNA, 161 bp, Parthenium argentatum
aaccatgcaggagctgttctttacatcaaaaaagaattccatctagaaacacaaccgacaatcgaagggctaatcgtgtcyatgtcacttatcggtgctacagtgatcaccacgttctcgggatccgtgtcagacgctattggaagacgtccaatgctcgt

SEQ ID NO: 1567 - DNA, 161 bp, Parthenium argentatum
aacatttctggggtgtgagtttggaggtcgatttctgatagacgccttctcattaatttgtcataccatgtatcggaatcrggttttttcccatttgcaacgagcccatcgccatttgtggcttcaccttgttctgacatcccgttcgctaagcttctaca

SEQ ID NO: 1568 - DNA, 161 bp, Parthenium argentatum
agttataaataaggtttgttgctaaataggtagagttgtaatttggttactaatttgagcatgtattcaagttggttgctraaaccgtgggaaaatgtgaagcttgtgtctacttagcatagtctgccctctttattttccaccaagtataggatgttggt

SEQ ID NO: 1569 - DNA, 161 bp, Parthenium argentatum
taggatgttggttttttgacccacatacagtttctaactcaaaaaagattagagctagttcacgtgttatagattaacacrctaacatgttggttaatggcccattggtcgttaggctgcataaagaaaattataatttaaacaaagagtaatataataaa

SEQ ID NO: 1570 - DNA, 161 bp, Parthenium argentatum
aatccagaaaatgtaccatttccaactaatacattggcacgtaaaagatttgattccacatcacttgcaacgtcagcttcrttaagcaaatcctgaattcgggaccaccaacagtcactgttcttctttctgtccaagacagaaacaattacagtcttgat

SEQ ID NO: 1571 - DNA, 161 bp, Parthenium argentatum
ataactgctttgcaacctcttcccgacagacgacatgtttggttggacttaagactgaacatacacacatgaatatacatyttagttgatctcttgcgttttgaatttgaatggtttttttatttgaacagggaaggtgtataaaggcgtactcgcgaatg

SEQ ID NO: 1572 - DNA, 161 bp, Parthenium argentatum
gacatggtgtttgatcttgcctgaaagttagttagatatactttttttagcatatgatataatacattatataattataamatcaggtattaaattttgttgaatgcacgttacatcatcaacttgtttttgcatttcagcaacaagttgtgctccactgg

SEQ ID NO: 1573 - DNA, 161 bp, Parthenium argentatum
tcggtttatctattcttttatatactttcctgttgtttctttatggtaacatgacatcaagattcatatggtcttactatsttttcgtatagaaatgcggtcatgttatagatatatagttgttaataaaccaaacatcaataacctttgggtcgatatca

SEQ ID NO: 1574 - DNA, 161 bp, Parthenium argentatum
gttgtaattagtgcaacatgagatgcactctattttcaaaaaatatttactactactactatacaatctgagtacatatcyatcatctcgtatgtatccgtctctcaccaaacgcaccatcacctaccagtgtccagtggcctggtccgcttggtcccgcc

SEQ ID NO: 1575 - DNA, 161 bp, Parthenium argentatum
aaaaactaacaaactcagaaatactgggaagacactgtacatgaagtcatgaacaaagaaaagatcaagatctaagcaacracttcactaagtttaattgttacaaacatataatataccgaatgaaaaataaggataagggattcacatgcgtggaagaa

SEQ ID NO: 1576 - DNA, 161 bp, Parthenium argentatum
taccaattgggcaattgtccatgtaattctttctccgtcataaacagtggtatttagtagtgaaataatttcatgattctrtttgcatagtaaggtgtgtttagaggcttcagacgaaataaaaacctgataaagtgcaaatcttggtcccatcatctgca

SEQ ID NO: 1577 - DNA, 161 bp, Parthenium argentatum
ggttggaaaaggacacagctgctactaaactcctctccaaatccgcatccctactgtggggctaaacaaattcattaacgwggtaatctttatagacccaaacaattgaaaatgacattcattttgagaaacagaaatgtaacaataaatgttcatttttt

SEQ ID NO: 1578 - DNA, 161 bp, Parthenium argentatum
tccttttgacgtggtgaagacaagattacagacacaggtatgtatttgttcaagtcattattgcatttttgttttgtacgkgactcaaggagcgcttttctttgcatcgtgttcctcacatgaatgaataaaaaaatgggattttgtgtagatacctggat

SEQ ID NO: 1579 - DNA, 161 bp, Parthenium argentatum
agaaaattgtcaacttaatgaagagcgaaaagatgttcgaatcgcagggaggcccgattattctttctcaggtataagcayttttatacaatattcaatctaacttttgtatttaattactgactggtgatcattaatttaaatttatgacatgttatgat

SEQ ID NO: 1580 - DNA, 161 bp, Parthenium argentatum
aaaaaagcacattagaaaattaaatatacctattttaacaataaatttttatttaattaaaaaacaaaaagttataaaaawtttttttaactattgtaacgattgctttgttaatctttttaagactagagctggtaacaaaattacttagaattcaaatt

SEQ ID NO: 1581 - DNA, 161 bp, Parthenium argentatum
atgacatacaatgctaggaacttgctctcaaagccgctaatcgcgccacaaaatcatcataatcaggaagtttaggatgcrcattaccgcgccgacccaaacccgactccgcctgataagtagctgcccttgcaagcccttttctctcatctaccgccaac

SEQ ID NO: 1582 - DNA, 161 bp, Parthenium argentatum
tcctattttgacttttaaagtctttcactcgcaactttgaccgtaaattattttgattgtgttatataatatttgatgtawaatatatggatagattgagttttagatgtatttttcattgatataactttcattggatattatatcatacaaacaaaaat

SEQ ID NO: 1583 - DNA, 161 bp, Parthenium argentatum
ttaaaaaaattgactgttttgtatcatacttataaattatcaacttacaaaaaggattaaaagagtcggaatgcagaaaawtagacataccccttagtgaggtctcattgatccagaggcaactcatcagtggcggagcttgaaaaatttttccagggggc

SEQ ID NO: 1584 - DNA, 161 bp, Parthenium argentatum
tttaaccattagtcccatttcccatttaaatccttttcttctttgaaccatttaagataaaatctaccctgtaaatgggtyagcattgccacctctagctaacaatattatagaaaacacattatatgattaaataaatacccaagatgaaatcggcaaag

SEQ ID NO: 1585 - DNA, 161 bp, Parthenium argentatum
ttttccaagccccacctaataaaataataaaccagacccccctccctctcttcccctatattaaccaatacaacaaaaatyactaaacaaccctcaatgtacaactccatatgcacaatgtacacatcactgaataaccattcacctggatttggttattg

SEQ ID NO: 1586 - DNA, 161 bp, Parthenium argentatum
tcgtatgaacacgatgctagaagtgagccaaacttggggtgagcccaagtaacctgccaaacaggaccgttatgaccggtyaaagtagcaaggggtactgagcttagattgtttatcttgatagtcgcatcagaggaggcagatgccacccgctttccata

SEQ ID NO: 1587 - DNA, 161 bp, Parthenium argentatum
agagtaatgtccttatacaggttgataacttggacatttttttaagggtttactaaaatcctaaatttaccccttcgaatrctaaacatacgcatctatttagcaaaagtaaaaaagataactaactcatttatttatcaggggttgccgattcgagatac

SEQ ID NO: 1588 - DNA, 161 bp, Parthenium argentatum
ggcgtgaattttttaacacgacacgaatctaacatgaaattcgtgggcttgggctttgtctaaacaggttcgggtcctaamtgggccgttttcaggtcaagctggcagattcacgtgtggattacttaatccaattaaattttatacttattttccagaat

SEQ ID NO: 1589 - DNA, 161 bp, Parthenium argentatum
tattgacaaataaatatgagttatcgttcatgtgtaattcttttttctttcttcatgtctgtctctcacctgaagcatttwtggtgcattttaaatttcttttgtttaatttttttagtcacattacctagatgtttaaatgctaaattttgttttacctg

SEQ ID NO: 1590 - DNA, 161 bp, Parthenium argentatum
atttcttttgtttaatttttttagtcacattacctagatgtttaaatgctaaattttgttttacctggttgtatgaaatawggaatttagttctgctgaagatgcacatgttggtgattgttttaattatcaagcttactattgattatggtagtaaagga

SEQ ID NO: 1591 - DNA, 161 bp, Parthenium argentatum
taaggtggttgagacactttgtttttcctaggattgaatcacacgcatcgagactcatgtacatacaaacatagtaacacwttcaaaactaataaaatcaccattataaatggcgacccctcccacttctcttacacatttgagcttttcagtacgaggtt

SEQ ID NO: 1592 - DNA, 161 bp, Parthenium argentatum
tctatctctaaaatcaaaatattaactttttttaaaaggcttaaacgggtcaacatttcgacccactttttaagacgattygttcggttgacccataatatgagattactctatgtattttacaccatttttaaccctatccacctttctgaaaatttccc

SEQ ID NO: 1593 - DNA, 161 bp, Parthenium argentatum
ttgggctcgtacaagttattactgctaattgggctgctgtttattggtctattagatagatgtatttggaattggctactkgatgaattgaatttcaggtgcttgttccaattgctactggaacggagccgatggaggctgtgattgttattgacgtgctc

SEQ ID NO: 1594 - DNA, 161 bp, Parthenium argentatum
tgcaatgtgatatggcagttccaatcgcttcttcgccaatattgcaagactatgtaacacaaaataagtaaataaaaaccscctcgtaaattatctcttttttcatgacagaagatatacattttatatccacattcagctagtttgtacaattggggggc

SEQ ID NO: 1595 - DNA, 161 bp, Parthenium argentatum
cgaatttattcaaatcacctgaggcatctgccacgcgtcaggaatatcaagccttgaagctgaaaaaatcttcaagaattyaaacccaaatcagcacaaaactataaccagtttaaacaaacttaatatgggcattcaagattttaaacagagaacaagaa

SEQ ID NO: 1596 - DNA, 161 bp, Parthenium argentatum
aaactactaaacactgttggatagaacctgtctttcaaaagtaaatcattttggagacggatgcccctcaaaagcaggttkatgttgtatttccttttcttatcttaataaaatatactctgggtcctatcacatatactaaaatcaaggagagaggggat

SEQ ID NO: 1597 - DNA, 161 bp, Parthenium argentatum
cttatcttaataaaatatactctgggtcctatcacatatactaaaatcaaggagagaggggatatttgtacaaacaattayacacttttaaaatatgaacaagaagcttgaaactagtatacgatataataaaaaccgaaccacattcagaaatttatatg

SEQ ID NO: 1598 - DNA, 161 bp, Parthenium argentatum
atttaattacacaattaaacattctcaattatttaggagagctagaataagcaattataatttgttagttatgctaatgcktaggtgaacctaatctaatcatattaattaaactttgcaatttctatatacctaatttgttacaaagttatttctaaact

SEQ ID NO: 1599 - DNA, 161 bp, Parthenium argentatum
aagaatatcgtggattctattagggttgttagttcttactcctccatttccaagggcaattgccataatagcaacaacttkcatatgaagcctaaaaacttaaagaattttctctcctgtaaatgccacatcataaattcatcacaaattgaaaattatct

SEQ ID NO: 1600 - DNA, 161 bp, Parthenium argentatum
gcatatgaagcctaaaaacttaaagaattttctctcctgtaaatgccacatcataaattcatcacaaattgaaaattatcyaaaacaacaaaaaatctctacactcaactgagatttctttacaaatttacacaacaaacgaaaagaactatttacatact

SEQ ID NO: 1601 - DNA, 161 bp, Parthenium argentatum
atttctttacaaatttacacaacaaacgaaaagaactatttacatactactcaaattcaatcggcctaatcatttaggaaytttcatgtttaattagatatacggtggccatggtgttaacttgtccaaactggcccgttttgacacatagccaatcgagc

SEQ ID NO: 1602 - DNA, 161 bp, Parthenium argentatum
taaaacatctggtctaaagaaaacaagaaaaacagttgtcctgtttaaagtatagaaaagctattgtcaaatcatgtgctrcccatgttatcatctgtatgaggagtatgactctggcaagcgaaaaccaggaagaactagtttgtctgcaaacatcttac

SEQ ID NO: 1603 - DNA, 161 bp, Parthenium argentatum
aaataacatctttcaaaaacaaaagctaagtgggctgggtgatatgtacctcctagccacgtagtcatgcatggatccacratttcaatttatttcttactaggttataacccgtgaacttcacgggttgtccaatttatttatttaattcacataaatta

SEQ ID NO: 1604 - DNA, 161 bp, Parthenium argentatum
ataacagcatcaggacttggaatacggaatccggatgaggtttacacatggaaaaagtcaactttccttcaccattggacsaaaaaagctatatcaacctcggaggaacatggtgatggcgcgacattctcatcttcattcttattcgccttgctgtccat

SEQ ID NO: 1605 - DNA, 161 bp, Parthenium argentatum
ggtgctggcaatgttcctgaaaccgctagctcagtccactccaatgacactgtttaaaaagcataaataatgtgtgttgawaaaaatatataagaatcacattaatgacacaactaaaagaaaaaagataggatttcaaaggcaaaatctttacttgtatc

SEQ ID NO: 1606 - DNA, 161 bp, Parthenium argentatum
cattaggccaagggacccagtgggatggaacaaaatttagccatttagtttagacctgctagtgatccaaaagataagagmtattgattcatgttatgtaatcaactattcaattaccatcaacaaactgggtttctttatagagacgacgagtgtggcaa

SEQ ID NO: 1607 - DNA, 161 bp, Parthenium argentatum
caaaaaagccctaatacatatacatgaacccaaacccttaattcagaaaaacataataaaaactgaaccctataaaacacmaaaaacaacaataatcttcttcaaaatataaaaacaccaactcaactatcagtttcaatctccacaactacacctacatg

SEQ ID NO: 1608 - DNA, 161 bp, Parthenium argentatum
aaaaagcgagacgtgtcatatggaccgtataagtaggtgaaaacggtcaactgagtcgtatgacagagcaaaaatgatcawatgggccatatgactttggcggtggtcacatcactcaatcaaatgcatcctacgatcataagggccatgtggcttcgccc

SEQ ID NO: 1609 - DNA, 161 bp, Parthenium argentatum
gccatgctagagaattagtgactggtgcctggtggtccctttttgcatagcttttgtattttcttaacttaactggagtgmtttattgaggtactcagaaacaagtgcaccattatcatggtcaacaagaatgaggattgcgctaggggcagcaaaaggcc

SEQ ID NO: 1610 - DNA, 161 bp, Parthenium argentatum
caatctggcatctgccaatagaaaccatccgtgttgcacagttgtggcagtacttgaagaaacctatttttcagcatgtgyttgccaacaaattccaactcaaaacttaatttcaaacatttagatcagttagtttgctattgcttattgttactcagatt

SEQ ID NO: 1611 - DNA, 161 bp, Parthenium argentatum
ctcattgcagataaaaaggttcgagtggccaagggatgagctgttcatatggataattagatccctcccaagatttaaccktttcatttggagggggaatgatgcacttgttagaggtccgggtgaagatcgataacccgcagtgttgtaattgagctttc

SEQ ID NO: 1612 - DNA, 161 bp, Parthenium argentatum
gaatatgaaacttacttcttttttcaacttacttggcccaccgaggaaacacccttgtctgttctaccacatcttgaataytgcaaatccttcctgtcaccaagtacaagtcttgtcttctgaagtgctttgaaaagttccgactgcaacaaagacaaaga

SEQ ID NO: 1613 - DNA, 161 bp, Parthenium argentatum
tacggaagtaaatttgtaccatatttggttattgaattcgatgatttgcatatgaagagaaagcatatgctatataaagaracattaaatctgaatatgaaccttcaaaccatggctcccttgaggtagataactatcacgtttgacccacgcaaaacaat

SEQ ID NO: 1614 - DNA, 161 bp, Parthenium argentatum
tgagtttgttcataacttattatgattttaagattttttcttttctctttagagttacaaatttgaattagtagttgcatwtttggaaaccagagatcattttcataatcctaaggttgacttcagttaaatggcaatttaattagaaatattgtatccat

SEQ ID NO: 1615 - DNA, 161 bp, Parthenium argentatum
agaaggagggcttgaacctccgaccttgtggttaacagccacacgctctaaccaactgagctattccagctttttaatttwgcaatgtttaaacataaatatattcttttacctaaaaagtgagctattccagcttttcaattttttttttttctcttttt

SEQ ID NO: 1616 - DNA, 161 bp, Parthenium argentatum
atgaacattgaataaatagttttctaaaatttcttcttgtcacatcttcaggaagaatgtcgagataccaattttgcaatytagggcaagagttgaagctcggctgaattatttatgtcctcagtttttcccagctccaggtttttggtctcctgaacaac

SEQ ID NO: 1617 - DNA, 161 bp, Parthenium argentatum
gtttgtcctttcaaaaaatgatacataattaaggctttaattatatcaacaaaagcaatgtcattacaattacaatctttkttttgaactaaacctatttgggaatctttcaacccgtctgacatgttccccttttatataaatcttttgactcgacattg

SEQ ID NO: 1618 - DNA, 161 bp, Parthenium argentatum
agcacgaaaagaccccaataaatattcatctatcgatgcctaataccatagattgtagtccgatactctctgtaagtaccwtctaaaattttgttattatttatcaatattataccatgctcactactcactagaggtggcaaaacgggcaggcgagtatt

SEQ ID NO: 1619 - DNA, 161 bp, Parthenium argentatum
aagtaccatctaaaattttgttattatttatcaatattataccatgctcactactcactagaggtggcaaaacgggcaggygagtatttgtataacatatcaaaagggtcttggttttgtatccattattcctttggaactgatctaaaatactctttttt

SEQ ID NO: 1620 - DNA, 161 bp, Parthenium argentatum
atcctaacaattaatgcacccaaatctaaaatggacccataaaattaaatgaaaaaggccaccgacaaaaacattcaataycaccctttctttctataatctcaaatataactgaatattgtcatttttttagttagaaatagtagcatagttaaaaggta

SEQ ID NO: 1621 - DNA, 161 bp, Parthenium argentatum
ttttagttagaaatagtagcatagttaaaaggtatatacattgtctaatttgaaggtggactacagttattgggaaaatamaagtaaatagtaaacttgagttgcttatagataatcaaaacagtaacaaaaaacaagacatttgcaaacaaattaacaga

SEQ ID NO: 1622 - DNA, 161 bp, Parthenium argentatum
gtgcatgtttggctctccatttttgagctccttataacttattgacttaatcaagaagttaataaggagaaaataatgttkgggtaatgggttgaaaaggaggtttttgtgggtggaaaaggagataagttataagttaaaatttgtgacttattgattaa

SEQ ID NO: 1623 - DNA, 161 bp, Parthenium argentatum
aaaataatatgatttaatttggttcaaagaaatccgaggaaaatacaattcttttggttactgatgtcataaatcatgatwtaatcatctgatatattaatcttgtactccaagagtcaaacaataatccagattctcatcacaaacaaataacaaacgat

SEQ ID NO: 1624 - DNA, 161 bp, Parthenium argentatum
tgattttggagaagttctttgacgtgattctaaatctaccagccgttcaccagtaagtcgatttacttgtataactaattyaatgtcaacatattaaagggcgtctttggatgcacatttcgaaagtgattatatgatattgaaaaaccagaatcatataa

SEQ ID NO: 1625 - DNA, 161 bp, Parthenium argentatum
acttacgccacgtgggcttccaaacgaaccttcatcgtcggagatacactcttttttaacttcacaactggattcgatacygtggctgaagtttatcaatcggccatggaggacccatgcaattccatcatcacactctcactcaaccccattggccctgc

SEQ ID NO: 1626 - DNA, 161 bp, Parthenium argentatum
gcacgaggttacgggattcgtgcgccatgtcaactcaagtttatttggtcaacaagatcatttttgtgattttcttgatgmaaagaatctaaaaactccctacttttgagctgttttttcacttcttcagcagatacttttgcatcttgaagttcctgttt

SEQ ID NO: 1627 - DNA, 161 bp, Parthenium argentatum
gtctaccaaccaaaaaaaaaaaagacgttacacatacttaaaagtagaggtttcaattttgacccgtttacttacgaatgwagtgtgatttatctcatacaggtcaaataaaatgaatttgctaataggtgaaacgatcaaatggggcagacgggttaaaa

SEQ ID NO: 1628 - DNA, 161 bp, Parthenium argentatum
atttgacaaactaaaagtcagaattgaagtggatttagtggaaacataaatcaactgtagatgagtatcctgaatacagastaaagaacatcacattcatggagacagacgacgatgttcactatactgttttccaatatacaaaatctcttttcaaattt

SEQ ID NO: 1629 - DNA, 161 bp, Parthenium argentatum
acattcatggagacagacgacgatgttcactatactgttttccaatatacaaaatctcttttcaaatttcaacacatgttyaaattactgtcgggcatttgccgtgtgcaacacatcctttaagacagcagcaattctatcggccatgtgtcgttctagaa

SEQ ID NO: 1630 - DNA, 161 bp, Parthenium argentatum
aaaacaattaaaaaaagaagatttgtgtatgcaagatgtgtgtttatgtgtgtgttgatgaatgcagctcggcagatgggmtttcatgatactcgagaatgcccgtatttgtgcaaattagcttctgattatatcaggaaagaagaaggatgtgaggaaga

SEQ ID NO: 1631 - DNA, 161 bp, Parthenium argentatum
ttttaagagccttgcgtctaggcccaaggcttgctctttgcgcctttgaccatctatatagtatatacattatctactggkaggagtgacttatgtattagttttaagatgatacccacacaacaggattgtagattctaggaatatgatatgaagaaact

SEQ ID NO: 1632 - DNA, 161 bp, Parthenium argentatum
attcggagccgctcaacgtataaatcatccggaaattcttcatttgtaatttcatcatctttctttgggtcgttcttaatwcgcacactggattttctagaaaaaacctttcctagcctgcaagcataaagacttagcatcaaaaaattctctacataaaa

SEQ ID NO: 1633 - DNA, 161 bp, Parthenium argentatum
ttttggtaaatcatcagacgagtatgaactttgaccttgatgactttgaccactataaccaacaggtaaaatatttacagrcaaatgattgacctgctaacaacacacagatgtcatcagatcctaattagataaaaatgtcaaattacttgaatttttaa

SEQ ID NO: 1634 - DNA, 161 bp, Parthenium argentatum
ttagccatttgctggataagttcctgcacaaatgataaaccacttcattaacatttggtcagatttgtaacatatgctcgkcaacatgattctcaacacgatgataagaaaggaacaaaagagaacgaagaatgaaagcgtaattttggatctggttgtac

SEQ ID NO: 1635 - DNA, 161 bp, Parthenium argentatum
cttggtaagttaccaagttccaaacatgtaagttaccaagttccaaaaatactgtacattcaacaatattcaagttaattyccaaaaacacatgagcaattcaattaacaaaagcctccacagtccacaaattataaaacacatgagcaattcaattaaat

SEQ ID NO: 1636 - DNA, 161 bp, Parthenium argentatum
gatggcgggaattgctgattatgctagatttatattgtaaaccagtacagcagccgcactcactacgagaagacggcttcrtcgtacgactcagagttcagcttcttttgggacgccattaccacacttcagaacggtagcgtttttgtttcttctaatat

SEQ ID NO: 1637 - DNA, 161 bp, Parthenium argentatum
cgcactcactacgagaagacggcttcgtcgtacgactcagagttcagcttcttttgggacgccattaccacacttcagaayggtagcgtttttgtttcttctaatattttctatactatgaaattatgttctgatttgtttttttatgctctacttttctt

SEQ ID NO: 1638 - DNA, 161 bp, Parthenium argentatum
cgccacacacaaataaataaaccctagccgtcaccacttgtgtaaaaccctagacagggcggtgtgccgccattgccgcckccgccctgtccagccgctgttcgttttagtttcccgttcacttttctttttcttatgtcctgttctaaataaagtctcaa

SEQ ID NO: 1639 - DNA, 161 bp, Parthenium argentatum
gcggtgtgccgccattgccgccgccgccctgtccagccgctgttcgttttagtttcccgttcacttttctttttcttatgycctgttctaaataaagtctcaattttcggttctagattatattccagccacgattcctagatctttctaataaaccatca

SEQ ID NO: 1640 - DNA, 161 bp, Parthenium argentatum
tcaattttcggttctagattatattccagccacgattcctagatctttctaataaaccatcatccatacaatccttgtagkacgtttatggcccacaccattaatttgggtttgactcaacaaaagttaaagtggataacaactgacggtatcgaaaaata

SEQ ID NO: 1641 - DNA, 161 bp, Parthenium argentatum
caacaaaagttaaagtggataacaactgacggtatcgaaaaatagaagaaacttcaagcacgcggccaagcaagcaggagkaatgtgtttcctccgtcgcagccgctgatcatgatcaagcccttgccgctagtcgtcttgctgctgctgttcatcgcaac

SEQ ID NO: 1642 - DNA, 161 bp, Parthenium argentatum
ttccatccggatgagggcctaatttggaggatgtttgttcaattgctctttggctattcagatttcagattacgtgtacawtatcagcattttttctggttatgttggatgtcacgccttaatgaattatgcatttgttcttctcacaggggttaacacca

SEQ ID NO: 1643 - DNA, 161 bp, Parthenium argentatum
ttttatgttattgatcttaatgtaaagttgttaattattcgccttccaataaacaaattagtgaggtttccactattaggktttgtacaaggattaaaaaaacatttgcaatgaaagcgtatacaacaaatatcttaaaaatttctgccagtgatctacat

SEQ ID NO: 1644 - DNA, 161 bp, Parthenium argentatum
tgtaatgtgagttgtgagtctgtaacaaaatgacaatatatttatattgttgtatgtgcaacataagtcagtgagtgttcrtaatgaattgtccaaatgtgtgttcgatttgtggcagctctagtatgcaaaacaatatgtcatattacttaccaatgggt

SEQ ID NO: 1645 - DNA, 161 bp, Parthenium argentatum
ttatctgaaagttaaaagctaatattttcttttgtttttttaaaggaaaataaagattcaattaggaattcgcgttgtaaygtaacgcaacgataccgtctattataaatttctgctcatagtttctgatcgatttaaaaacatgttgataacctccgatg

SEQ ID NO: 1646 - DNA, 161 bp, Parthenium argentatum
aaacacatgagttgataagaatgtgtgaaagctcacagatggtgacctctaatcacttggttcctttaaggttgtttcatrgatggttttattgttgtctttagtagaatccaacaagaaggtgaaagtagaatggttctctaattttaaggtacaatagg

SEQ ID NO: 1647 - DNA, 161 bp, Parthenium argentatum
gtttatgacttttgagaaatccaaccaaggaataatgtttttttaggttataataagaacagacaaaagatataaaaaaawaaataaataaaaaaccaaaccgatcatactgatgtttaaatacaacaatctggtctactagagagaaaaatacattattt

SEQ ID NO: 1648 - DNA, 161 bp, Parthenium argentatum
caatctggtctactagagagaaaaatacattatttagacctcaaaaccatgagggcttttatactatagcagccttattcwtggtgcttataacatatgaagtaaacttattcgtaaaaagagttgtatatatataattactgattaccgacaatcgggct

SEQ ID NO: 1649 - DNA, 161 bp, Parthenium argentatum
caaagacgcgtttaactgcacacgaagttttatgtaagttctacaaatcattacttgtatttggtaaatctgagctaaaakttcgttatttttacataatcaattatgaacttgtacatttttaaaataattatgcattgattgatatgcctgtaataatg

SEQ ID NO: 1650 - DNA, 161 bp, Parthenium argentatum
tttaataaatgcattgagcatgtaaaaagttgtttaagagacgggaatatgcaaaaaaataatattgatgatatagttctsgttggtgggtcgactaggattcccaaggtacaacaaatgctgaaagaattttttgacaggaaaccactttgcaagagcat

SEQ ID NO: 1651 - DNA, 161 bp, Parthenium argentatum
ataatattgatgatatagttctggttggtgggtcgactaggattcccaaggtacaacaaatgctgaaagaattttttgacrggaaaccactttgcaagagcatcaaagcggatgaagctgtcgcttatggtgcagcagtgttgtctgcaaacttgagtggt

SEQ ID NO: 1652 - DNA, 161 bp, Parthenium argentatum
gtccatagatatatgagtgccataatcccaagaaacacgccaatacccaccatgaacgagataatttatgggacagatgtmgataaccaagaatccattatagtcgatgtgtatcagggtgagtgtgttaaagtgaaagataacattttccttgatgagtt

SEQ ID NO: 1653 - DNA, 161 bp, Parthenium argentatum
tgcctataccaagaacacgcctcattttatcaaccgcgccaaaaaaagattataaaaacaaatgtatggaatgttagaaayataaaactaaccataacccatccccattcgtcagcaaacgaaggcacatgggtcgtgtatgcaaccacatctgcaataaa

SEQ ID NO: 1654 - DNA, 161 bp, Parthenium argentatum
ttttgcactttgctaactcagggcaggtttgctgcgctacgcctggcctgatcagggcgcctttgattacataggacttgktatatttgatttatttgaagtggatttatgcaacctagatgtcatcgaaatgaatgcaattggtgagtggtgacgctgga

SEQ ID NO: 1655 - DNA, 161 bp, Parthenium argentatum
gatgtcatcgaaatgaatgcaattggtgagtggtgacgctggaagaattatgcatctggatgaaagatactttagaagctmtggccttctatctttttaggtcaaaatctataggctgattaagtgtttgttattttgaattctagggtttatttgctacc

SEQ ID NO: 1656 - DNA, 161 bp, Parthenium argentatum
gaattatctattagtattatatttgaattatctatattagtgttaggtttaaattatgtttcctattgtttagataattaycatttagtacttttggagttctagtagaattaggatagtgggcctataaaagtctttgtttcctttgtatttttcattca

SEQ ID NO: 1657 - DNA, 161 bp, Parthenium argentatum
agtgtgtgatataacttgttgaaaacaaagtagttaagtaattatacatttcatcgttagaagacaaaatcaaatctcctmtcacttttagttatgatattccaatccatactcttacatgatctttttataaatcacagtataaagacatcatgaccata

SEQ ID NO: 1658 - DNA, 161 bp, Parthenium argentatum
aaatcacagtataaagacatcatgaccatatcttgactgaccacttcgaacttctaaaacaacctgatgcattgtgctctmtacagtaaactcatgaacaagaccattgatctcaatccaactacacccggattgtgtctttaagtttcaatttctcatca

SEQ ID NO: 1659 - DNA, 161 bp, Parthenium argentatum
ttctaaaacaacctgatgcattgtgctctctacagtaaactcatgaacaagaccattgatctcaatccaactacacccggrttgtgtctttaagtttcaatttctcatcagcttcctcgtcgttaatgaatcttcccacttgttaatcatcaggtaaatgt

SEQ ID NO: 1660 - DNA, 161 bp, Parthenium argentatum
gctgcttcaactaattgcaggtcatgttttattaaacaagcattcagaacagacctcgaataaccacatctggttccatargcatgttctggatcaactccattgctttaataatatgcccaacccaacaaaaaaagatcaagttttttcgggttttgacc

SEQ ID NO: 1661 - DNA, 161 bp, Parthenium argentatum
gttaaaattagggtattgctctttgcatgatgagtctaattgaattggcataatgatcatgttttctgattttttttgttwtatgtgaacgcccaattgcagtgagtgtgagtgtattctatcaatatgcgtcggattgtagtaaatgagcgggtttacta

SEQ ID NO: 1662 - DNA, 161 bp, Parthenium argentatum
ggtgatcaaaacctagaaaagaagcagaagttttgtataattaggtgcaatttcaatccttttatatgaaaacgaatcggytcaggctagatttgattgatagtgggtcaaaagggtgaaaatattatatattagtgaagttaaatatttgacagtatagt

SEQ ID NO: 1663 - DNA, 161 bp, Parthenium argentatum
ccccgcagttggagctgaaggaaaatagaagctcaaactgaaataaaacataaaaaataataacaagataaacgtgcttcrgtcgaatcagtattccgtactttgcctacaaatccatattttgtttaatttttccatccatagccttcatagacagatcc

SEQ ID NO: 1664 - DNA, 161 bp, Parthenium argentatum
catatataataataattatgtaaagatatatttgataaaacatatataaataataagctcgtttgggcttgtttattaaaygagctccgataggattaagctgatttaagtacggttcaattcaaacttttagcgagctgatcttgagtagccctgtgctg

SEQ ID NO: 1665 - DNA, 161 bp, Parthenium argentatum
ctccaatttccatgtaacgaatgatacagtgaactacatggttaaaggtgtataatactatgtacgatgaatggtccaaasatccatctaagacacatccatgtgggacaaaatcattgagaatggtacctctagtttcgtgtttgtcaagtcctagagac

SEQ ID NO: 1666 - DNA, 161 bp, Parthenium argentatum
ctctcaatcctcttactcatacttcttgtatggttcatactccacccctccaaaccagagtttgccctcaaagaagccgayatttaccaactcggcctctcaggatctcaccttctcaactcatccattcaaatcactcttctttcaagaaacccgaatca

SEQ ID NO: 1667 - DNA, 161 bp, Parthenium argentatum
gaaaacaaggataccaatcttttatcgatggttttagttgcaaacgggttacctgtggacccatctttcggttatgaaatkggtcgtgatcaaatggtgggaaggttggttttaaatctcaagtcaaatggtcaactccggtggaaggtaggaacttgggt

SEQ ID NO: 1668 - DNA, 161 bp, Parthenium argentatum
acaaatagagagaatgagacatcaaaaggttcattcctgtaaatacccttctttccaccacccattctttgtcttgcttamacgcgtctcttactcttcttcatcagtcagcatcgtctcttacaagattaacacaaagcctacaaacaaatcaacaaaac

SEQ ID NO: 1669 - DNA, 161 bp, Parthenium argentatum
ggtggtgataatgtgataatgtttttagatgtttaaagaatgatggtattatgatgtaccaactgactaagcatgtttttrgtgtttttaaagctccttattatgatgctcttatgtattctttgttaaatctcataaaaaactattactttaatagtaaa

SEQ ID NO: 1670 - DNA, 161 bp, Parthenium argentatum
atactttttttatttattttttaattccgtctcgcgcttacgcctcggttcgcctcgaggcttacgcctcatgaggtaaasggaaaacgcctcgaggctcgtttttgtacttttaaaccttgattataataaatgtgtatatgcaggaaaacaaaagaagt

SEQ ID NO: 1671 - DNA, 161 bp, Parthenium argentatum
ggaaggacctcgtctttaggttttagatccccaaaagatatagtaaaagtattgggaatatcaggaaccggctttggtttyggattagggttttcattcgctggaatactttgtttgttgatcatattgttgttcagtttattagtagacagctttttcat

SEQ ID NO: 1672 - DNA, 161 bp, Parthenium argentatum
caaaggcttgttcctaatgaccatggtgagcaaaaccagatgtcatgacattgactatccttaacctcaactcttctatgyatcctttgggcatataatatgttccacatttcgaatacatgtcgattaacaaatttattattgtctcgttcatgtgaatc

SEQ ID NO: 1673 - DNA, 161 bp, Parthenium argentatum
gtttttgtgtcttcttttagttaaaagttaagtttataatcttgaaacacaccatgtatgttaattgcataaaatatataraagtctagaccagaaagaatggatggtaatctttttcgagttttgatgactttttaaattaaaaagtttattgtttgtat

SEQ ID NO: 1674 - DNA, 161 bp, Parthenium argentatum
ataaacatcatctttttcaatcttcagatgaaaaaatggattcaatcacctttcttagaacacaaaataccctagcaactytatattaatgttgggaaatttatgagcaacaagtttaaaaataactgtaatacccaaatatttgttatactaaattttca

SEQ ID NO: 1675 - DNA, 161 bp, Parthenium argentatum
tcatcatcatctgatttcatcaactgctggggccgcaaatcttacttctgccgggcgggctactacaacaggttcatcagmaaagagggctttgataaatggtggggtttttaggggtcgacgtccagtcattttcggataaacgtcttctaggaaatagt

SEQ ID NO: 1676 - DNA, 161 bp, Parthenium argentatum
ccatcgtgttttatcaccatcgtgttaaaacatcacatctgaacccattgtgttttaaaactcatgttaactactcatccraacttattgtgtttttatcaacccattgtgttttaagctcatgttaaccacacatctgaaccgattgtgttttaaactca

SEQ ID NO: 1677 - DNA, 161 bp, Parthenium argentatum
ccaaactgttactaaaaccaaaaaacagaaaccgaacggttttcaaaaaccgaaaaccaaaccgaacagtgcacacccctrctatgtaggataaattaacttaggcaataataccttgtttttttcacctctacctaaagaaattgcttagcttgatagcc

SEQ ID NO: 1678 - DNA, 161 bp, Parthenium argentatum
cttccccttccgccatgaaagttccttgggtaataatttcctggctcttcaaagtattggttacgtccattctggtagggrccagctctgccgccactgcgaccaccacgcccattcccgtaacctctaccaccaccacgaccaccaccaccgctgctgcg

SEQ ID NO: 1679 - DNA, 161 bp, Parthenium argentatum
aagtaaaagataatagtatatttttctaaataatttattttttatagtatatctactaagtagagtatttaaaagtaaaarataatccaaatgggtttggaccttcctaactgcattagaggagttgtgggtaggggtgaaaaaaattctattctggctgg

SEQ ID NO: 1680 - DNA, 161 bp, Parthenium argentatum
aagcgtgctaagttttctccagtttctagcaaaacccacctgcccgaaggctcactggtggtataacccgaacaccctctrgatcgaactgaagatcacaaagatctcagtcttctttcactgagccaccatgccccctccaaagtgttgccagtgggaat

SEQ ID NO: 1681 - DNA, 161 bp, Parthenium argentatum
gtcagtagtgtaaatttatgcgttttcgtctgaaaaatttatacgtattggctcccctctccccgattttaagggctttargggtttggtaactttcggcctcccaaaaaaaatttaagctccgccactgaccaaaacagagagagtatcgactaggataa

SEQ ID NO: 1682 - DNA, 161 bp, Parthenium argentatum
tcgggtttgtctacgctttaacgtaaattttgtttgaaaacgagtcggtcaaattattaaatatcttttatgttcgttttkagttgtacaacgttttgacgtaaattctgtttggaaacaaatcgggtcaaatgtaacattttgattcgatggtataagtt

SEQ ID NO: 1683 - DNA, 161 bp, Parthenium argentatum
taatgattttgtttgaacagatgttggcagataaggaacctggtgagagcatcattcgtcctagcagccgtggaccctcayacttgactttgaccctaaaggtctatgatggcgtttatgctcacaaagatatcactgaaggtgggaaagagaataaagac

SEQ ID NO: 1684 - DNA, 161 bp, Parthenium argentatum
atgttggcctatcggaagtttagagatgggggaaaagctgaagttgatgaaattttaagaaaagagaaaaatgaaaacccwtcaagaattgtttactcgtttggtatatctcatgaacacccggggacgtttattttaacttatataaggagttcaaatcc

SEQ ID NO: 1685 - DNA, 161 bp, Parthenium argentatum
ctcccggggatgagccggcctgtggtgacgtggcgggtgacgtagaggcccatcctccatcctccatcctccacacccccmtagcctaataaaacaactcattaaccagacccactactttgattaatatcacacataataaaacatgtggcataaataaa

SEQ ID NO: 1686 - DNA, 161 bp, Parthenium argentatum
gttaacgccagtagaaaaataaatgcccgaatccgattcgcatattatttattatgggagacgaaaagacaatttttaagrgatagacaagtacaatccgtagatactcgaatctgatttgtgtagcattcaattctcattttttattttttgcaagaaca

SEQ ID NO: 1687 - DNA, 161 bp, Parthenium argentatum
ctacttctctttcttcaacctaagtaataattgaaaagatctcacaagattcaaactttacaaaataacataaaatttacmatcactaactgaaaaggtaagtgtttgtgtgtgtttgttgtttggagtgatagtagtgcacatactgtgagaccagcatg

SEQ ID NO: 1688 - DNA, 161 bp, Parthenium argentatum
attattatattatattataccacaagttttagcttagagtgatgagcattgaatccaccatctttgtttttaggttgtggwgataatggggacaatggagatgttgcagatgatcattatcatatgttcttagtgagtctgttaattaaaaactcctgtta

SEQ ID NO: 1689 - DNA, 161 bp, Parthenium argentatum
accgattttaagttggtctaacctgtcttgcctgttttaagttcgtcttacctggctcgacccatttcaagtcattctaamccggcctgacttgtttgaacacatggaccaaagtttttatggaacagtgaaactaggaatatctactttgtgcaaaataa

SEQ ID NO: 1690 - DNA, 161 bp, Parthenium argentatum
ctactttgtgcaaaataatcttattaattttctagcaggcttttatcttattatataagtaataattttataaaaatctamtatcttaatggagcaggtgacttatgccaagagcgagtgaaggtgcattctcaagcatggaatcttggtgtgaaggattc

SEQ ID NO: 1691 - DNA, 161 bp, Parthenium argentatum
aaatcgtgatttgaaattaggaagttgaagtgtaaactagggggtcgtaacaaagagttggaagagcaatgttacatattstcgagtgatggatgacgaatatataagaattgcatgcctagtttcctaaactaattttaagtttatgtttggagttaaat

SEQ ID NO: 1692 - DNA, 161 bp, Parthenium argentatum
atagttgctcttgaacaacaggtttcacaaatatcatatgtgctatgcaagtttattatctattattcgtattattatttraattttgacatatctttgtttgttagttattagctggttagttttgtcattatctttttcattgtaatctctttacactg

SEQ ID NO: 1693 - DNA, 161 bp, Parthenium argentatum
tcaactccatagcgtcgataggctgctagcattatcagaacaaatgacatcttataaaatcgccatgtgaccgctaagaamaccaccttaaaagagtcaggaccaaataaatgtatggtacaaatatattgtaacatacaacatacatatctaaccaccaa

SEQ ID NO: 1694 - DNA, 161 bp, Parthenium argentatum
caggaccaaataaatgtatggtacaaatatattgtaacatacaacatacatatctaaccaccaagaattcgtaataacccytaaaaatgagttcaatggccaatttctttgctagcttctatacatatctccattatacacatgttacacaatttctatgt

SEQ ID NO: 1695 - DNA, 161 bp, Parthenium argentatum
ttatacacatgttacacaatttctatgtataattaaaaaccatctcaaattagagaatcaaagtaaaaatgtttgtgcctycgtcccaactccagtaggctgccatatgtacggtcccaaacaccgataaaaagtgactctgtgtcaggactaaaagatgt

SEQ ID NO: 1696 - DNA, 161 bp, Parthenium argentatum
caatattcactatccgaaattttcggatatccggttttcggatatccgaaaatcggataatccgatcttgaacacccctaytaccctccactccacccattattccacccgtaacttagtgtaaagaactaaaaaccaacctgcccaaatcggcgggacac

SEQ ID NO: 1697 - DNA, 161 bp, Parthenium argentatum
attggtacttattgatctttttcctatgatttttcaacactattgttgattatgcaactgtaggagcttcttctaaacttscagccatccttgtaacatatcaattccaggtaccaacacttggatttaatttctaattattttcaactcaaatgagataa

SEQ ID NO: 1698 - DNA, 161 bp, Parthenium argentatum
tcaagaatcatttggagaagttattgttccaagatgttgtttcacttgtcaccatattgtaagtttctttactttgacttktttaatttctctttcttttgtaataaaagttgttgactattttctatacattcatcttttatattcactagctataccca

SEQ ID NO: 1699 - DNA, 161 bp, Parthenium argentatum
tcatgatagcaccattaatgaagataatgaaaatgaggaacaagaggcaatagttaacagcaacactcaaggtatcaatarctcaatgatgttcgacagttctgtaactgaaaggaacccaggtgtgcatttacagttctaccataatctaccatatattg

SEQ ID NO: 1700 - DNA, 161 bp, Parthenium argentatum
ctaatgaacggtacgtctaagagtttgatttaaaacccttcaaaaccggatcgtgagccagcgtctctagccattactcaygtaccatctcaaaactaaataatattattaattattttcattaaaaaataaaataaaaacaaagaaataataactccttt

SEQ ID NO: 1701 - DNA, 161 bp, Parthenium argentatum
agccaaaccaaactatatcacaacacgggtcgtgaaaccgaatcaaaaccccttaaaaccaaaccatcaaaaaccccttawaaccaaacctttcaccgttatttcagatcaaacttcacgtttttcaacaacattatggtgaaagatgctgacgacatcag

SEQ ID NO: 1702 - DNA, 161 bp, Parthenium argentatum
attttatatttttttatatatgatatataaacaaaaaatggacccctctctagaaaacggaccttgtgcggtaatctgtckctaatacttagcataaaacttcgtataggattccttcctagtctcagtcatttgtcaaaagaaacatgttgaccatgtag

SEQ ID NO: 1703 - DNA, 161 bp, Parthenium argentatum
atttaacagttacgaaattagcggcttagatgactcccaaatcccaatgcatagcacaaaatggtcactctcttttatcckgacaattaaatacatgatttaacttttagtatgcaaacctcactccaaatcctcaaaatatccaatcaaaaaaaaaaaaa

SEQ ID NO: 1704 - DNA, 161 bp, Parthenium argentatum
tggatgattcttccaccatagcttcatttgactgaagggattcagtctccattctgtctacagatgggccagtatgaaacrggctgggttgagcattagcagattcaactggatttgttggaggaaccgtatgggtttcagttgagacgaatgggattatg

SEQ ID NO: 1705 - DNA, 161 bp, Parthenium argentatum
cagatgggccagtatgaaacgggctgggttgagcattagcagattcaactggatttgttggaggaaccgtatgggtttcarttgagacgaatgggattatgttctggcgtgctacctctggagtgaattttcgattacagctattaatggtactagcattc

SEQ ID NO: 1706 - DNA, 161 bp, Parthenium argentatum
tatctataatgaccattgaccagtgacttattttgagtcaatgttatatcaacagggctttagccaatcaacccagtggakttgtttccctattagggtttctagttaaaccaaaactgaccaaccatataaaacataacccaaattaacccatttgtata

SEQ ID NO: 1707 - DNA, 161 bp, Parthenium argentatum
taacaacaaatctcaacagcactaacctctggtttgttcttaatattttttgctcggtgtgcatagtctaaagtactgagygtttcctccaaagagtaaatagagggagagatagtggcaattatgcatgtctttgttttccctcccaaagaatctcttaa

SEQ ID NO: 1708 - DNA, 161 bp, Parthenium argentatum
acaaaacaaaaccataccatgtcatatctacaactctacaaaaaacataatataaacattgtaatagtaaccagattcaayttcaattttttaactaacaataatcaatctaaaacctataaccagaaccaggtggtgctggtggcaaccggtttggggtg

SEQ ID NO: 1709 - DNA, 161 bp, Parthenium argentatum
gttcatttcttcgtttaagtcattgctgtcatttgctcattcggtggtttatttttaacaacaaattaattgtaaatgtcratttcaaggatgaccctgatttgcatgtcttccccaagtcgaagtatgttggcatagagctgtggtaggtaatcaattat

SEQ ID NO: 1710 - DNA, 161 bp, Parthenium argentatum
ctggaacaatgtttcacaacgtcctgatatacgatgatcttgaatacgcccacaagtcacagaagaaacatgcggaaaacraaaagacgtatgcgacctcagtatcgataaaacttatttgtttatatcatcgtttagggctgttaaaactcgccattgtt

SEQ ID NO: 1711 - DNA, 161 bp, Parthenium argentatum
actttgagtttggaaattagcatacattgagattttactttgtttgtctcactttaatcgacatttaatattatttagccragaataacaaactacaaagtgcttctttgcaggtgtaaaaagtacccatcaatggaactcaggggtctattccagtatct

SEQ ID NO: 1712 - DNA, 161 bp, Parthenium argentatum
ttcagaagcgctctcgttttacaacggcctgtacaagaacctttattagtcgtggcttttcttcctttaccatcaaacggycttacagttggtcaacttgtcacattcaaatggagacttgaaaggttaaccagttttcacctcgaggacgaattattgta

SEQ ID NO: 1713 - DNA, 161 bp, Parthenium argentatum
ttaactgttgcatggttgacatttgtgataatgtgattgtttgagaggatagcgcacgcatatggttgaaatctcaatttraaagtcatttatataaactagtataacaattactaaattgacatctgaatcattatgtatactctcctcttatacattaa

SEQ ID NO: 1714 - DNA, 161 bp, Parthenium argentatum
ggtttaagagtctcgtggcttcggcccccccaaaaaaagttttcaagctccgccactgctgagaaagatggtttctttttwattaaggcatttgcggctggtgtcatattgattattggctactggttttatacatgtacttcctgatgcattcgagagct

SEQ ID NO: 1715 - DNA, 161 bp, Parthenium argentatum
caccgcagcaatgaagctacaccgcagctcaggagggatctaaatcgcataaaagtttagtcacttcaaaatataattatycttttggtatgggatagactgttgatgtatatggtgtacctgaggagcaacttttgtcttcaaataaagggccatgtcac

SEQ ID NO: 1716 - DNA, 161 bp, Parthenium argentatum
aatgatctacgcaaaattgaggatcatccatacccacctaaagggttgggtttagaataccattcacattcctatccaatmatttatcaaacccgcaatcatagtgattccctgttgcaaaccactcgccacctgaattagtaattgttgacaaaaaccct

SEQ ID NO: 1717 - DNA, 161 bp, Parthenium argentatum
ggcattatgacatcaacaaagggtgtatcatttttgtgttcaaaatagggatgttctaaatcttccaactggttatattcraacactattgactattttttggacttaggacacttgacccctttactttcattgtaactaaaaagagagaaacgttatat

SEQ ID NO: 1718 - DNA, 161 bp, Parthenium argentatum
atacattgggtttcatgggaccgggttactttaagtaaaaaggcgggaggtttagggatctcgagattgaaggaagtgaaygctgctcttttattcaaatggaacggtaggtttcgctcggaatccggtagcttatggaaccgagtcatgagttattgtca

SEQ ID NO: 1719 - DNA, 161 bp, Parthenium argentatum
tcgagattgaaggaagtgaatgctgctcttttattcaaatggaacggtaggtttcgctcggaatccggtagcttatggaamcgagtcatgagttattgtcataagactcgggctagtttctactccttaccggtcaacaatcagcttggcgtgaaccgaaa

SEQ ID NO: 1720 - DNA, 161 bp, Parthenium argentatum
ttcgctcggaatccggtagcttatggaaccgagtcatgagttattgtcataagactcgggctagtttctactccttaccgrtcaacaatcagcttggcgtgaaccgaaaatgtgttgtgaaatttattgacagccttacggtgggagaacgccctcttttc

SEQ ID NO: 1721 - DNA, 161 bp, Parthenium argentatum
cttcatttcagaaaatatgatgagcgtgttggaaaacgctgacatgggcatacgattccctgatcttcagtttttggcaayggcatcgtctcctgtacttgcatctgatgctttttcaactttaatgtggatcctcttttgtcttccagtaccttttatgt

SEQ ID NO: 1722 - DNA, 161 bp, Parthenium argentatum
tcattcaagggtaatgttaacttgttatgtgtttataaagatttatgttttaatggatttctatcttggtttaaaagggcrcgccttatgcacgaggtgctctaggaaattaggaaagtgcctttaggtccttgaggcaccgcctcatgcacatgtgggtc

SEQ ID NO: 1723 - DNA, 161 bp, Parthenium argentatum
gcattgaagaaacagcttatcatctccactgttcttatgaccgttggcattgcaatcgttagtttcattgggctcccgacktccttcacaatctttaattttggtgttcagaaggtcgtgtataactggtaagcaaaagtttcttatcggttcatttttat

SEQ ID NO: 1724 - DNA, 161 bp, Parthenium argentatum
aaaagtttcttatcggttcatttttatatatacactgttgaaatcacaccaagtttattaattttggtgtttacttttgaygtctgtatgcaggcaacttttcttgtgcgtatgtgtcggtctttgggctggactaatcattggttttgtgaccgagtact

SEQ ID NO: 1725 - DNA, 161 bp, Parthenium argentatum
ctctgttcaccaaatacaaacctggtgcatgaggctctcgcatgtgcgtgtcgggccaacgtgggccttatgcacgcatcmttaccttgcatttctgatggaggctgtttccactaatcgaacttgcaaacctctattcgctaaatatgtaattaaatgac

SEQ ID NO: 1726 - DNA, 161 bp, Parthenium argentatum
atctagggtacatgcattattgtttagggtacgacattagggctgaagaaagtatcaagtattgattggtcccacaatgarggtacgtgtgaaagctctatgaacacaatgatacaaaatgaaaccaggcaattgattactgtaaaaccatggaggaataa

SEQ ID NO: 1727 - DNA, 161 bp, Parthenium argentatum
atatttttaaaccaaaatataacatttagtttctttttctaatgaattacagccgtggtcggggatggatttatcggccgmggtttcactgtccgaaacaccgcgggcccacaaaaccaccaagcagtggcggtccgcagcggctcggatctttcggtatt

SEQ ID NO: 1728 - DNA, 161 bp, Parthenium argentatum
tccttttgattagacatataatgcttcaaaaggttgtcaccttcatgttgaaatggacagtgtagcagattcgggtgttcrtcttctctataatttttattaattttcccaacacctgatgaatagtatatatacttgaaattagactaaggtatataatc

SEQ ID NO: 1729 - DNA, 161 bp, Parthenium argentatum
gaacttcagagctttattgacaagtaagtaattagatgttagtcagttaaacctgttactgctaaatattttttttacctmcatatacatatgatttaataactggtgttgacttattaggttaaaagtctggtagcaatgacaaataagtgcatgtttgg

SEQ ID NO: 1730 - DNA, 161 bp, Parthenium argentatum
gaaaaattatgctggattaatttataagtacttgctatttgtttttgttaggttctgggatgacattgaggagtgatgacmcggccatcatgaaaggctccagaacaaggtgacataagtgaagactacatctggagatagccagggaaaaactataagta

SEQ ID NO: 1731 - DNA, 161 bp, Parthenium argentatum
tgaacgatgtgatgaacgatcttttctgggaccattttctgcttcaaaagctcaccaattaaacggatgtttccgagagtrcgcagcttaattattctttctttatctctgcgttcagattcttgttcaggggcagtcatttgcctaatttctgcccttag

SEQ ID NO: 1732 - DNA, 161 bp, Parthenium argentatum
tggaaaatgaataattagattatttgattacaaaatattatgaactgataactggactggatgagtataaagtgactattwtttataaggaagtgaatgagaagctactggatgcattgtcatcaagctcactcattgtggataaacgtacatatgaattt

SEQ ID NO: 1733 - DNA, 161 bp, Parthenium argentatum
acaacgatctcgccctcatcttcttattcgaaccatcatcatccacatccatgtcatgatcagctgacctctccctcttaygacctctagacttgcttcgagcccgttcaattgctttagacgggtcaagtcccaaagatgaaagttgtcggcccattctc

SEQ ID NO: 1734 - DNA, 161 bp, Parthenium argentatum
cgttcaattgctttagacgggtcaagtcccaaagatgaaagttgtcggcccattctctcagaagtgaactttttgtccttrtcgaactttcttggtacaatgggccggctttctgctgtgcttttcttaattctatgttctctaatgagtatgcttttctt

SEQ ID NO: 1735 - DNA, 161 bp, Parthenium argentatum
aagtagttaaaagctaaaaccacactcatggtagggtccgttgtgcttttagtaaacagttacaagactctaaaagtaggwatcttgaaagcaatctggtttattcttcattctgctttaattgtcttctttttctttaattttttagtttaaatgataca

SEQ ID NO: 1736 - DNA, 161 bp, Parthenium argentatum
tatcaatctttacatgtcacaatacaatgacaacttaaaacgatttagatacgcatagaaacacaataattttaagctctrcagaaatcaaatatcttgacaaatctatggctccaatttgttaaaaagagagtcgaatgcaacacgaaatttattgaaag

SEQ ID NO: 1737 - DNA, 161 bp, Parthenium argentatum
attgggcctttgggctttaaaagcagaacttgaagacctctgctttgctgttcttcaggtcagtgattactactgataccrtgtgatcattgtatagagatgaataattactgatttatatggcgtgcagcctcagatcttccgccagatgcgatctgacc

SEQ ID NO: 1738 - DNA, 161 bp, Parthenium argentatum
aggatcatttaaaggatatttagattttttaaaattgtcttattttgtttttaagtattcgtattttatttttatagtttyagttgtgtaacatttctaatttctaattttaatgaaatttaaattttaattagatttaattgtttaaattattttaaatt

SEQ ID NO: 1739 - DNA, 161 bp, Parthenium argentatum
agatctagagttcattgatgagttatttgcaaatgttggaagatagtttttcttgctcttctcgagcctacagaaagcttrtgtacaaagagtcaaatactgtaccttgattgaccgtagttaaattactagtcaactgtgcacttccattggtttaaatt

SEQ ID NO: 1740 - DNA, 161 bp, Parthenium argentatum
gcaccaataccttgaatttctctctttagtaatcggactgggcagctcatgggcaccaggctgacagagaaaaaaaaaatwgaatcaataatcgattttattacacactagaatataagaatactctacttagtgttttgttaccttgtataggacaattg

SEQ ID NO: 1741 - DNA, 161 bp, Parthenium argentatum
gtgattaatatgtctttcatgttttcaatgtgtgaagtgtcgtttcgagtcttggagattttgttatatacttatcggtamtcttcactttgagatttcattgatcagtggtgtaccgcctcatacatctcactgagataacaattggagtgaaaaatgtt

SEQ ID NO: 1742 - DNA, 161 bp, Parthenium argentatum
ataaaaaactatagctaccagctatcagctacagctaccagctaccagcttccagccaccagccaacagcttccagccacyagccagcagctagttttcccaaacatacccatggttgaccttgaaaattgtattatgcatagaagctggcaattccttaa

SEQ ID NO: 1743 - DNA, 161 bp, Parthenium argentatum
atatgcatatggaaacatagcacatcttatcatcatatttgattacaacttgtataaaaatgttttaagttacatgaaacwtgtatcaactagatgatataaacctaatccatggtgtcaattcttgaactgtccattactgagcttgaatattacacgca

SEQ ID NO: 1744 - DNA, 161 bp, Parthenium argentatum
aaacttgtatcaactagatgatataaacctaatccatggtgtcaattcttgaactgtccattactgagcttgaatattacrcgcagtggttccttcttgtacattgctatatccatctcctcatccatgttgatagccatggggtttatattatccggaat

SEQ ID NO: 1745 - DNA, 161 bp, Parthenium argentatum
aatgatatattttatatgctaaaattaacgcatcaattactcaacgagtaatccccgtgggagtactcggcgtgtcatctycgagtactccccgactatggccgagtactcccaactcccctgtcaaccgatttagcaccgtctagcgacttttgcaacca

SEQ ID NO: 1746 - DNA, 161 bp, Parthenium argentatum
gtaataacattgctaaaatccaagaaaagggggatactaatttcttacagttttaaatgcatccaaagcagctccagagcygattgaaatttataattctccaagatctagaaaggcctataccatagttgatctagccttattgtgctggactttagctg

SEQ ID NO: 1747 - DNA, 161 bp, Parthenium argentatum
tcaaagagaatgtatgccttcatgtttaatttatttacctgataccaagttgcagattaagcatcagatagtggcttttayggtcttcaaaaatgcctgcgggcttctttttaatttccttcatttgaaatttgcgttgttctcttttatatgatgatcca

SEQ ID NO: 1748 - DNA, 161 bp, Parthenium argentatum
ttctttttaatttccttcatttgaaatttgcgttgttctcttttatatgatgatccagcataattcttagtcatttctttkatcagaaccccttgtatatattccctttcacaaactatagtactattatcatcttcttcactttctccttcatcagataa

SEQ ID NO: 1749 - DNA, 161 bp, Parthenium argentatum
tgctagaaaattgagtttgtgactgcatttgcggtcgcaaaatggtcacaattgccttattgcgactgaaaatgctgtagkaaatacaccgtcgcaattgccttattgttaccgcttctatattttgtgaccgttcctttttgcaactcaattttgttttg

SEQ ID NO: 1750 - DNA, 161 bp, Parthenium argentatum
ttaccgcttctatattttgtgaccgttcctttttgcaactcaattttgttttgaaaggatttattttagtttccagtgtcytttcgatttacaaatatatccaaaatcatatataagaagacgatcagaccaaagatttatatatattgacgaaattatac

SEQ ID NO: 1751 - DNA, 161 bp, Parthenium argentatum
ttcaagtacacgtcacccggttcatatctttatcacactatacagttgcgtgataccaaacagagtgtcatgaactccccwttttgtattttaaatatttcggggtgagcacatgctatgttttatttaaacttttgttatgctacaagatactgttgcca

SEQ ID NO: 1752 - DNA, 161 bp, Parthenium argentatum
ttcttattatggcatctgcagctgggtaatatatttacttccctaccttttagtttacatgcttgatggtcaatgctgatytcattgaccatgctatttacactggtgcagacctcaacaacaacaagaagttatgacctggttgctcgagcctttgagcc

SEQ ID NO: 1753 - DNA, 161 bp, Parthenium argentatum
cgccgactaacgtccaaatcagtaaagacattagtgggtaacacatgttcttatagtttaacttcatcaacattgaccatrtattttaattcatatatatacatatattttctaactatcatgagctccagaaatttaatgttggaaaataattatttaaa

SEQ ID NO: 1754 - DNA, 161 bp, Parthenium argentatum
atcaacattgaccatatattttaattcatatatatacatatattttctaactatcatgagctccagaaatttaatgttggraaataattatttaaaaaaaaagaaagatattataggtctattattattgtgatttttaatgtttattattttttagtata

SEQ ID NO: 1755 - DNA, 161 bp, Parthenium argentatum
cagaatatataacagatctcttgccaaggctttgagtggcattttaaaaaagtattactctattgtcttttaatattttgrtttgttgaatatatattataggttatatacttattctttgtaggcatctcatgttgtttgaagacattggaggcgattac

SEQ ID NO: 1756 - DNA, 161 bp, Parthenium argentatum
tctgaagatctatataaaccgaaagacttgttcgatcctggtgattcactattagcatcggtattctctggtgaagttcawaagtttcctggtgaaaggtttgtttcagatggatggcttaacatattaagaaaagtgggccttcaaaatgctggtgatcc

SEQ ID NO: 1757 - DNA, 161 bp, Parthenium argentatum
ttaaaacattggcgctaaaaaagaactgggtcaaatgggagatacacatctagcatacaactataaataaaaaaattagawcatacctattgttctaacttctaactacttccaaagtgagcattagtagcctaaaagatccaaatggatcccaaaaatta

SEQ ID NO: 1758 - DNA, 161 bp, Parthenium argentatum
aaagcacttgccaatgctgctgcggaagtctcttgggttaaaaatctactcggtgaacttggcatcaaaaacatcaaaacrcccaaactattctattctgtgacaacacgggagctacatatttatgtgcgaatcctgtctaccactcccgtatgaaacat

SEQ ID NO: 1759 - DNA, 161 bp, Parthenium argentatum
cctatttgcactgccattttggaaaagccagataaccgctattgactgcttagcacaaaaattaagcaaatagtagaggtmaagtggcactggagagtgaaagttatggttatttaactggcaagttaagaaaaagagcctaacgaaaccttaaaaaagat

SEQ ID NO: 1760 - DNA, 161 bp, Parthenium argentatum
aagtgttacaagtaaccgatttactagaatatgggtaaatatgatacatttagtgttttaaaaggtaaatatgatattatwaaaaaaaagaaggatatatatgaatttggtcgaataaaaaactagacatcaataatgggtatactggataatcaatcacc

SEQ ID NO: 1761 - DNA, 161 bp, Parthenium argentatum
agccgaagagatttgaatctcggttgtgaacctcagttaccatagtttctaaaaacttgaaaaacaatactttggaatgtmcagcacttttgaaatacaactgtgacgagttaacataatttcagaaccttctaatggttactttggtattttgctatttt

SEQ ID NO: 1762 - DNA, 161 bp, Parthenium argentatum
tacgtaaaaattaaaattcctaaatcaagcagaactcgtcttgacccgttaccacccgaccagccaataaaacaaacctcrtcttaccacctctactagagactaatttttatgtgattccaagtaacaaattatcatcaaacctctactcggtttgccct

SEQ ID NO: 1763 - DNA, 161 bp, Parthenium argentatum
aaatccactcaaccacaaaacaaaccaacttttttaattaaaaaacaattcctaaaatggtgaatattcatggtaaaaaawtaagtgactttgctaaaactacttcaagagcgtcagcttagaagcttaaaaacgcctccatgtcatctctgttttataca

SEQ ID NO: 1764 - DNA, 161 bp, Parthenium argentatum
tcagattatcaagtgattcaaactttgcaagaaacgtagctggtgtattagtagaatcaggagcacaaaatcaaacccatwtaaaaggtaataatatggtaattttgttacttgttagttgttacttacttttagattggttagagaagaagaattagttc

SEQ ID NO: 1765 - DNA, 161 bp, Parthenium argentatum
cttcctgtttactttttgtaggcttttttttttcttatcgggttatttgtgacctcagaaactaaataccagcttcatgckaaggaagttgctcatgatttggatcttacaaagtatgacggcattctttgtgttagcggagatgggattttagttgaggt

SEQ ID NO: 1766 - DNA, 161 bp, Parthenium argentatum
cagttctcaagaaaccgtcatacctcacggttgaaaacctgagccgggaaccaaaactttccagtctcgagggctcgatarcaagacacaatcgaatcaacggatggttgagatgaaaccttcatcttcttaatatcatcatcatcatgttcaagatcatg

SEQ ID NO: 1767 - DNA, 161 bp, Parthenium argentatum
taaaaaatttatataaaaaacatagtgcatattttattaaacaggttaaatcgtgttatagacaggtcaagaattgactgktcctagttttggtatccaaaattgttacaaatatacataatacatgaatttcagtaggttaaacctgctaaccatttagg

SEQ ID NO: 1768 - DNA, 161 bp, Parthenium argentatum
atatattgtaggttgattgggatgagccggagctgttacaaaatgtgaagcgcgtaagcccatggctagttgaattagtgkcaaacatgccactaattcatctctcacccgtttctccacacagaaagaagctaagattacctcgatccccagatttacca

SEQ ID NO: 1769 - DNA, 161 bp, Parthenium argentatum
attacatatgttttaactgtgttattttgttcaaaaaaggctatgtgatagagctaatttaaaagcttggttttaaaaagwgtgcgcctaagatgcgaggcgatggtggcaacaaccaaagcacctcagggtatggaggcggcgcttcttgcaatgtagat

SEQ ID NO: 1770 - DNA, 161 bp, Parthenium argentatum
ctgcagcaaaatgaaatgacgtctaagatacagggcagatcaggaaaggtggtgggggttaacctacggcatttatacccktcagcccttcactagattagtgcattaggacatgggcgttggaagtgtaaggaccaaggagtaagagaagggtatgatga

SEQ ID NO: 1771 - DNA, 161 bp, Parthenium argentatum
catgagagatcggaactggagcaacttaagcaagatgttgctaatgctaacaagcacatacagaacatcactaaagctctmgagaagaaggtttcggaggctttctattgccagcttgttgacttatgtcaatcttcggatctaactgtttttatgaattg

SEQ ID NO: 1772 - DNA, 161 bp, Parthenium argentatum
catacagaacatcactaaagctctcgagaagaaggtttcggaggctttctattgccagcttgttgacttatgtcaatcttyggatctaactgtttttatgaattgtaaaattgcagctgaagttacttgcaaacgtacagactcaaattgatcaggtcaaa

SEQ ID NO: 1773 - DNA, 161 bp, Parthenium argentatum
cacaataaagcccctaggggctttatccacacccccagccttagaatggcctaatttctcacccaaaataaacctggttgrgttttgttatcactaaaagaacatacttatacataacctttctttttaacggctaacacacacaccttttaaaatctact

SEQ ID NO: 1774 - DNA, 161 bp, Parthenium argentatum
tatgtacttcagtagataattaaaaatctttaagtgtataagagtaagctaaaacaatatgggtttctgttcacagttaayaaataaacaggaggaccgggatcaagttgtaattcttttccaggatatgcatgaagttgtgacaagagacataatggaag

SEQ ID NO: 1775 - DNA, 161 bp, Parthenium argentatum
gtgattattgtaacaatattctttagcacccaaatttttcattaaaaatgttagaaagtgaacaaaaggtgtttcagttcwaccaacctgacccgctttgaaccatttaccaacccgcccattttgccacctctaatatcttgatgccagaaatgagattt

SEQ ID NO: 1776 - DNA, 161 bp, Parthenium argentatum
ctttgatacactgctgatagcccgttgtctttttcagaagaaagaacgatttgcttatcgatcacttgcaattctttatgratcttttgatcttccctttccaaatccttagcttttctctccatgtttttatgcatcgctaacctcctactcatttcttg

SEQ ID NO: 1777 - DNA, 161 bp, Parthenium argentatum
cacctattcggctaggagaaaagggaaccggtccatcagcggtttcttcaggtacatacagaagacattttagaagccagytgtttaaggatgtcacaaaccccttttgggttccaaaccaacatgagaaccgcataatccaatttagaagttcacgttct

SEQ ID NO: 1778 - DNA, 161 bp, Parthenium argentatum
tattaatttgcgtcgtttatatatttcgtattttataggtgttcgcgacggagtggagccaaaacgaagatattatggtcragcgcgaaccgtggcgagcatagagtataataataataataataataataatagtaatgatgaaaaaaaaaaaaaagaac

SEQ ID NO: 1779 - DNA, 161 bp, Parthenium argentatum
tcaccttttaaatccctcctttcaagttttaacaaaaccaactgtctgattatcatgattactaacttgtgtttaattaayagactatagtttatatgcttgccatcttcaccaaagatatttactatcatgatttatatcataagttatttttcatgttg

SEQ ID NO: 1780 - DNA, 161 bp, Parthenium argentatum
taccaaatagtgaacataataggaaagggggagaataatatcggcttttggagtcctgaaaacggcatctttaagaagttyaataatcgaacaaaggatcttaaagcggtcacatggcccggtgacactcatgttatccctaaaggctgggagatcccaac

SEQ ID NO: 1781 - DNA, 161 bp, Parthenium argentatum
gcaaaaggcgggtttgttcagttcatcgatgccaacactgacccgcgaaccaaacaagttatcgtgacgggtttctgtgtkgacgtttttgatgcggtcgttggtgctttgccctacgcggtcaaacacgacttcataccttttgtcactcaagatggcaa

SEQ ID NO: 1782 - DNA, 161 bp, Parthenium argentatum
tcccaattttactactaacttttttgaggtctccaaaatatcatgggccctttgaatcagtggccctatatcccgtggcarcaaggcgtttattgatgaaactgattaagatttgaatggtctgagattatatgcagctaagaaagcaaagcatttgagag

SEQ ID NO: 1783 - DNA, 161 bp, Parthenium argentatum
aagttattggcttttgattttacagtttaggctaattggatctcataataatctatgataagatagtgcccagttatttawaagttatctcattgactgtctgttgtgaaaatatttgcttattaaagctttagtaatgtagcctcctactttctttttca

SEQ ID NO: 1784 - DNA, 161 bp, Parthenium argentatum
aacatcggccaactcggccttgtactcggtcaacccggccttgtactcgacggtcaaaatcggtcaacttcggcctactcrgtcttgtactcggcgaagtttgaactttaaacatgtatcatttaaattatgtttgttttgacatggattatgcttctttt

SEQ ID NO: 1785 - DNA, 161 bp, Parthenium argentatum
aacttaatacttttataaaaagattaagaagggtgacctgcatgatggagggttcgtgggccatttagaatgatctctgakagaaagagggaggaagtgaaggaagaagtaatcgctccagtcgagcttggcccctttctccaccccgaggcggcttccgt

SEQ ID NO: 1786 - DNA, 161 bp, Parthenium argentatum
gtttgaataaagcgctttaggagattgtatccattaaaaatagagtttagatgagttttaacccatttgacccgtttgagytaaaacacaatcaaaatcgcccactataagtaaatcagtcaaaactgccacatctatgatctatcctaacccgcccacac

SEQ ID NO: 1787 - DNA, 161 bp, Parthenium argentatum
ataacacatactttaagaaagcatttgaactaagacaaaaatcaaacgaaataaagacgaaaccttagcatgaaaaaaaahaaattcggagaagataacatcatagagagatagagagagtgaaatgtaaaaatcacaaagggtacccgatggagatacaa

SEQ ID NO: 1788 - DNA, 161 bp, Parthenium argentatum
ttgttttgagaagtttttgaattgtgatatgaattattgtggtgctggtgtgcttccgaataatgtgcatcaaatgcaccwtgttgatcttcctggaccctttgtgttgcaggtattttgcgcgttttaagtctcggtttcgttcttgtttgattattttg

SEQ ID NO: 1789 - DNA, 161 bp, Parthenium argentatum
aacagacgtccggttatcgaaaaactgacaactccgggatttaaactaacaactcctttggagtttaaagttgtgtcaccwacaggtgtgataaaccgaaatatgggtgggattggactcggtatagttgcagcacttgaagatgtttcggccaagaaggt

SEQ ID NO: 1790 - DNA, 161 bp, Parthenium argentatum
gtaataataatgactatttgtaacattgactatgtaaaagatatatatgaagtttgcagatcaataaagaaaataaaacawgatctaccgaacaatttatggaactatgttatctaacatgtatacatgtgtctgatgattgcatagattttcatttttta

SEQ ID NO: 1791 - DNA, 161 bp, Parthenium argentatum
ttgaatgggtcagcatttagtttatttatgtaatgtgctttagtgtttgattgggtcatggcccatctatatgtgttagtstgatgattggtcagataatgatccataagctagctaacgggtagatcacaatccacttagttcggtcatggactcgggtc

SEQ ID NO: 1792 - DNA, 161 bp, Parthenium argentatum
ttcaacgaatctaccaccccaaaaccggctataatagtcaccgcattaaacgtttcacatattcaagcctcaattatatgygccaaaaaacacaaattattaatgaaaaccagaagcggtggtcatgattacgagggtctatcatacgttgctgaccaccg

SEQ ID NO: 1793 - DNA, 161 bp, Parthenium argentatum
aatgtatctttagcttcccttgttgcatcaggatcttcaagagggaacacgtctatcagtaaatgcagtgcattttgacgwacatccgagttcgcaacctacaaagaaacgttagcaaacatcttaactttatcaaatggatacaattgtatagtttaacc

SEQ ID NO: 1794 - DNA, 161 bp, Parthenium argentatum
caagaggtaatcatgcatatgtgcattttaaaactgttttttaaattggtactgttacattgaaatattttttattgaagkgtatgatatttgtattccgaatttgtctatcttgacaatatagtcctattttgtttcgttggtttcatgtaatttaactt

SEQ ID NO: 1795 - DNA, 161 bp, Parthenium argentatum
ttacattgaaatattttttattgaagtgtatgatatttgtattccgaatttgtctatcttgacaatatagtcctattttgyttcgttggtttcatgtaatttaacttctaaacaggcgaggtatctggcatctattcagcaccggaatattgtgactcttt

SEQ ID NO: 1796 - DNA, 161 bp, Parthenium argentatum
agttagttttgaatgttaagtgatctaatatgaaatttattcattcatttgtgaaactatatgattattagtatgtgttawatggaatgccaaagtattgatagcattttttcattgaagttaaaaagggggcatttgatgtataaattgaagtctttaat

SEQ ID NO: 1797 - DNA, 161 bp, Parthenium argentatum
aattacaccaatggcacttctatagctggtaaattctggatgcataaaaaaaatagtaaacagtcatagtcatactgaagsaaactcagcaatataagacaccaaaaaacacccaatgcaatgatagacaaaatatcacaactacatgaaaacatcactca

SEQ ID NO: 1798 - DNA, 161 bp, Parthenium argentatum
atactgaaggaaactcagcaatataagacaccaaaaaacacccaatgcaatgatagacaaaatatcacaactacatgaaarcatcactcatgaaaacatcacaactacaaagatcatttcataacaatcgaaagcaactaaacagagctaattaaatcagt

SEQ ID NO: 1799 - DNA, 161 bp, Parthenium argentatum
gagcgttaacaaaggaatttaggtcgagacgcggacgcccgggagtgagcatggaaaatataataatataatataatataractaataataacattaaaaataataagtaatagtagttattattaaaataattgtaataaataataatatataatgtaat

SEQ ID NO: 1800 - DNA, 161 bp, Parthenium argentatum
aaggttagctatagttggtttaggtagcatttttgtactggaagttaagggcgatttgtgtcttcagattacatattgctycctatttgtgaatttagattgttaaaatattgcttttgattcagaaattgtgccggactagcaaatttatattttttata

SEQ ID NO: 1801 - DNA, 161 bp, Parthenium argentatum
agattcatcgtaatctgccttcgttatatgttgattttgaggaaacacaaccttggcaagtatggcacctcccacccatgmtgaatacatggataaattctctggcatgtactctggtgcctgcatttcaaaatcccgcacaatattatattaattttgta

SEQ ID NO: 1802 - DNA, 161 bp, Parthenium argentatum
tttagagactttctaagggttttaggagttttttgaagcatgtttgacaaataggttaggtagcaaactcatataagttcrctaaggtggcaagtgaactcaagtgagaagcaaacttgcctacgatagatattgttcgctcgagtatatatactgttatt

SEQ ID NO: 1803 - DNA, 161 bp, Parthenium argentatum
aatccaataaagaagaataaatccaacaaaaagttgcatattctgacccattcgacctatcgtttgaaaaacaagacctgrttgttttaaacaatcaaataaacaagtgaaatacttacagctgcttgataactaatatattacctcttcaggagtctgct

SEQ ID NO: 1804 - DNA, 161 bp, Parthenium argentatum
ttgtgctgatatagttgcatttgcagctagagatagctttgaaatagtaagaaaaatgaaaacttatagcccaaaagcctkgtcctaaacaaatatgcaacttttgggctcaaccaggctaactgggccaagcttttctgattgtgcaccaagactcaaca

SEQ ID NO: 1805 - DNA, 161 bp, Parthenium argentatum
tcgtttgttgaaatcttctaatattgtttgttggtctgcctttttcagcccctgtgatcaaagcatgaataatacaagatmtattagtactctggttgatatgaaaaacacttcaaatgttcataaatagttttaattaaaaaaattattccacagatgga

SEQ ID NO: 1806 - DNA, 161 bp, Parthenium argentatum
ggcaccagggtcacaaggatcagatggcacaaagaaagcagaggagctaaaaaggaaagctagagcagagaggttgtttabagcataaaactttttactgcatatttcaaatttaatttccagactctatactcatcactttttattgtatttctgtgttg

SEQ ID NO: 1807 - DNA, 161 bp, Parthenium argentatum
ttaatttccagactctatactcatcactttttattgtatttctgtgttgatcagatttggtatcactaagtcaacacctayagaggaagaggagaaaaagaaggctagactctccaggtttggatcaccttctagtgctgatcctaaagaagaagagaaaa

SEQ ID NO: 1808 - DNA, 161 bp, Parthenium argentatum
  modified_base (81)..(81): a, c, t or g
taaaaaataataaatttgaagttaaaaagggagcctacaattgtcaagcctcttttgacaaaagcaactgtgaaaccgctngtgattttatgaaacaattaaattgctctttaacaaaaaccaccatggttttgtaaaaaccattataaaacccatttatg

SEQ ID NO: 1809 - DNA, 161 bp, Parthenium argentatum
cgatcggaatcgacagaatgcaagttggtgattgttagggttctactgtaggttctcacgttggcataggcatggatcaaygaaatgttgtcagcgtgaaactaattgccggcgccgccgccatctcggctgcaaaccaccattgtagccttcatcttgtt

SEQ ID NO: 1810 - DNA, 161 bp, Parthenium argentatum
aaccggtttccgttgctcaagactgcgtatgatggggagaagaatattttcagtgcggtattattggaaccgggaattttyaatgttcaattatatggtcggtcttatgtgtgcaccatcaagtttggaaacgagctaaacctttcgaagctacaagattt

SEQ ID NO: 1811 - DNA, 161 bp, Parthenium argentatum
tccataccagaaacttatcaaatgctaaagctcatcaaatgaaaatcagcaaactaacacatgtttttcaaaaccccaaawagccctaaacataaaatacttatggaaattagatcttcaaaggaagccataattgaaaagcaaatctaaaatcaacagaa

SEQ ID NO: 1812 - DNA, 161 bp, Parthenium argentatum
tctaacaatatatcaagaacccaaactagacgcatctcacatctactttgaactcaaacaaaatatcaatgaacccaaacwagatgcatctcacatctaccttgaattcaaacaaaataccaaaaagtcaaagtagacgcatctcacatctactttgaatt

SEQ ID NO: 1813 - DNA, 161 bp, Parthenium argentatum
agtgtagatcagacctcacaggtcactggccagatgtttgcatctgctgcgattcttgaaccactagaaaccacaacagayggtgatggtggttccatgtcaagctaaccttgttaggttgagaatcatcgtcgtctttttgatctagtaacatcattgtg

SEQ ID NO: 1814 - DNA, 161 bp, Parthenium argentatum
ggaaaactgtctttcggggaggctttatctaggtatcttttctatagcagttacttctctcgtaatctcgatactataaamtgccagtaattttatttgtgtatttgtcattttagatgtaaagctcaagatgtacccatatgcctcatgtatggaaagga

SEQ ID NO: 1815 - DNA, 161 bp, Parthenium argentatum
ttttctcaaatttataaatttaatgcataccttatagtaaaactgtctttaattatggaacgatatgattgtatataacawaatcttgggttgcggtgatatactgcatattcttataagtacttgaataattatccctaaaactagaagcatttaaattt

SEQ ID NO: 1816 - DNA, 161 bp, Parthenium argentatum
tgaatttatacgcacgtataaagtagtttgtgttctgccaaaagtgcatgtatattattgaataacaagagtctttaaacwggcaaacaaacaactttaaaactaaacaaaccaatacacaaaagaccgcatgtttattttgcaacaaactatcctaaaac

SEQ ID NO: 1817 - DNA, 161 bp, Parthenium argentatum
gtctttaaacaggcaaacaaacaactttaaaactaaacaaaccaatacacaaaagaccgcatgtttattttgcaacaaacyatcctaaaacctggattcctcatgacccattcttattctaacttaacgattgctgcaaacggtcacttcaaagagctacc

SEQ ID NO: 1818 - DNA, 161 bp, Parthenium argentatum
tgttaaaataatacaacttctcaatggtatttgacaaactaactcttaaattgttttacaaaaaagttttgtgtcacctawcaagtttcatatcagtcagtttgacttaaaaaagtcaaagtgcacattttcttagctagttcttatatctggaaaccaaa

SEQ ID NO: 1819 - DNA, 161 bp, Parthenium argentatum
actttcatcctcatctcaaccatctcactttcttctagtcaatctcccgtccttgacactaaccaaatgccgctagtaacyggcatctcgtactacatcgtgcccgccgttagcggcaggggtggcggtgtaaaactatccccgacaacgctaaaccagac

SEQ ID NO: 1820 - DNA, 161 bp, Parthenium argentatum
cgctagtaaccggcatctcgtactacatcgtgcccgccgttagcggcaggggtggcggtgtaaaactatccccgacaacgstaaaccagacatgcccactcaacgtggcgcaagaaaacaacgaacaaagaaatgggcaaccattggatttccaactagcc

SEQ ID NO: 1821 - DNA, 161 bp, Parthenium argentatum
aacaacgaacaaagaaatgggcaaccattggatttccaactagccatccccaacagaggcggtgtcattcgtgataacgckgatcttaacattagattcacgggtgcgacaacatgtggcaagcctgctgtttggcgggtcgaagaggtcaacgggcaacg

SEQ ID NO: 1822 - DNA, 161 bp, Parthenium argentatum
cagatgagcccgtctttgaccatggcttcacatttaatgtaggtttggtcaccaccatttgctgaatcgactgtttttgarcaaagtatacaacaacaatcgtgacagaaacgaggctcgatgcagcaaatatcacaggccattatgtttgaatgatcggg

SEQ ID NO: 1823 - DNA, 161 bp, Parthenium argentatum
accttacataaactgcagcagacaaaagttagcatctgtagcacatagccctgtagcatgaataactcctcaaataataayaattaaaaaaagatgatgctagcataacacacacatggtaaaaaaccgaacaaagaaaaagaccaacagtttaaatttga

SEQ ID NO: 1824 - DNA, 161 bp, Parthenium argentatum
tggcgcaaaaacacaaagacaatcaccaatcgagtccccctaaagtgtaagaagctctaagtctctgagacaaaactaatrctctaatgtaccctaaaagtccttgacctcaatcctacgcctccacgtagtcctattctggaaaatgtcctcagagaggt

SEQ ID NO: 1825 - DNA, 161 bp, Parthenium argentatum
aagtctctattgtttatttttgatttcatacgctaacgctagagaagttatgcttgatttcataaaaatcatagggatttwaagctcgagactttcttgaaactgtcttcttttatgttatacagtttcaaggactagcaagtgtttctatgatccccaaa

SEQ ID NO: 1826 - DNA, 161 bp, Parthenium argentatum
tatgtacctatataaaacagttagtttatgtagtggtgagtatatttagagactattgacacaacatgtttcataaatatkatggaccttttctttaactttatatataccacaagcttgcacttgattgttgtaatttattctaaaacttaatcaaggtt

SEQ ID NO: 1827 - DNA, 161 bp, Parthenium argentatum
tacataagttatcacagctaattatatgattttgcttattcaatatcatttaatcactttcaatataaatatccaaaaacrcccattatcattcacgctacaaaacagctttattaagattacctggtttgttagctcatcggtttcatcttcagcttcat

SEQ ID NO: 1828 - DNA, 161 bp, Parthenium argentatum
tgatgaagaggctgatacatggaaataaatgagtattggattagagtcgattgtggattaaagtccttaatcggttcggcmactgaattgactagcaacaggtttgtagctcaatctgtggagcgtatactcttcccactatttgaatggtgtctggtacc

SEQ ID NO: 1829 - DNA, 161 bp, Parthenium argentatum
ttgaaggtaaggaacgaaatgattcttggggagatcaagccactatgttttctttggttttaaatatagatctcttagtcrgggagagttgtgtaaattttccttgtatgtgttgtagccggtgttgtgtcttacgtccccttccagtccggtagggtggc

SEQ ID NO: 1830 - DNA, 161 bp, Parthenium argentatum
ttggttttaaatatagatctcttagtcggggagagttgtgtaaattttccttgtatgtgttgtagccggtgttgtgtcttwcgtccccttccagtccggtagggtggcattctttgttaatgaagttaacagttcaaaaaaagggggacatggacctggtt

SEQ ID NO: 1831 - DNA, 161 bp, Parthenium argentatum
atgaagttaacagttcaaaaaaagggggacatggacctggtttgttacagaaaaccctaattttcttcatgtaatgttaakttgtttaagctggccattcaagggcataacaaggccaaacttgcgagagttgattagatacgtggttgtataattgtctt

SEQ ID NO: 1832 - DNA, 161 bp, Parthenium argentatum
taaatgcatgactgacatgtgctatgcaggagttacctcattgatcgggcctgcatgagggaccaggcaatctgggtggtwgggccaccagggggaggaccggagaccctgattctggagttgcggtagtggagaatagcagtggtcatgagcacgcgacg

SEQ ID NO: 1833 - DNA, 161 bp, Parthenium argentatum
gtttctttgcatactagtttttttagaaaaaaggatggggttctatgcatagtcttatgaaagcatatgacagtagtaagytatgaaaactttttaaatttctttacttttgactttgaatgagtaaaaagaaactaaaccaagctattttcatcaacatg

SEQ ID NO: 1834 - DNA, 161 bp, Parthenium argentatum
ataacttttagtgtacattttaaatatttatataaatgggtgaattacatcaatatgtatccaagtatccaattatacacytgtttgttattgatgtattaaactaccaaatgtaccttttgatgtaccaaatttccagttcttgctattgtatgtatttg

SEQ ID NO: 1835 - DNA, 161 bp, Parthenium argentatum
atccaagtatccaattatacacctgtttgttattgatgtattaaactaccaaatgtaccttttgatgtaccaaatttccarttcttgctattgtatgtatttgaccttttagaacttgtaaaacggtgatgtggcaacttatatggctgccgcgtcaccgg

SEQ ID NO: 1836 - DNA, 161 bp, Parthenium argentatum
tataattgaatacatttccatgtagtttgccctgtacattcccgttttcccaaaacaaatgggaactggtttgccctatcrgttgtgacttttttcaagcttagcggtaattgtctcacttacattacacagttaagagttatgaaaacttttacgacaat

SEQ ID NO: 1837 - DNA, 161 bp, Parthenium argentatum
tcaaacataaaaagtgattatgtgatattgagtaatccaaatcagataattagctgtaacaaaatgggttattagagatawtgttggatgtgccttggttgtttgaagttaactattaattgaaattacaataagtagaatatcaaacatagttattacct

SEQ ID NO: 1838 - DNA, 161 bp, Parthenium argentatum
tatcaaacatagttattacctcattatagccttgccacctggcttaaggactcgacgcatctccttgaatacttcaatcgrttttgtcaaatagtcaacactaacctgccgtgcaatacggtatttagtaatagcccggttcaagaatatgtgaataacta

SEQ ID NO: 1839 - DNA, 161 bp, Parthenium argentatum
gacctacagcggttataaatgtaacaatgataaaatcaattaatgtaaaaaatctttcacatgggtatatttttttgaacrgctcacatgggtatattgattcttactttattcgccttgagttcttcttcattaagacccatacccgctattctttcttg

SEQ ID NO: 1840 - DNA, 161 bp, Parthenium argentatum
agttgtaatttgtaaactatccctaacatacaatgataagtaaactatagtacctatagataaaaggagcaagtagacaaraaaaacaagcactaaccactgtctagcaaattctgcttaaccaaatcaaaccaattacactcactaattagtaaaaaacc

SEQ ID NO: 1841 - DNA, 161 bp, Parthenium argentatum
agtgcatgtggtcttaattcactgcacagtctcataacctcttttctaaccactgcagcattatctgttgacaagtaaccrtatcgaagaaacgatatgtcttcttccatcacaattgttgtgtacattgatctcattaaacctaacacgtcctgcaacaa

SEQ ID NO: 1842 - DNA, 161 bp, Parthenium argentatum
gtacgcaaaaatattttttacaattaaagatgttagactaatcacttggtcaaatatttacagaaagaggattcatgtaaygcctgtggtgaatctgggaatctgcttgtttgtgaaacgtgcacttatgagtaccaccctaagtgtttattaccacctct

SEQ ID NO: 1843 - DNA, 161 bp, Parthenium argentatum
gatctggtttcatatgtatagacttgcatgtttgtgtatgcataaatttacagaaaggatagcttcataacacatagagcmttctgtgatgctctaatggaagaaaactcaagaattgcatcacgtccactagttcccaacatgacctttcggaatgacat

SEQ ID NO: 1844 - DNA, 161 bp, Parthenium argentatum
ccatcaagctcaaattacaacaatgttggaatgttacaaccggatatgatgaattggttgggtagatacaatagtttaccrcaagggttatcattaaaagatgaagaacactcaatgtacacctttggtggtggtggttcaacgactccaaacactcttat

SEQ ID NO: 1845 - DNA, 161 bp, Parthenium argentatum
acggtcgtggcattagtagtggtttaacatgataatgatggaggtttagcggtgaactagaatgaactcgccactttcttmtttttgaacagcagtgagattttacaactgaccaaagacgcaagtagctagacaagtagacagtacaaaaaagatcacca

SEQ ID NO: 1846 - DNA, 161 bp, Parthenium argentatum
atgctaaagaagctgttgaaatgtttgaccaaatgacaacgaacaaagtcaaagtcaaacccgacttgaccacatttcttrtagtaatttctgcttgtagtcatgtaggatggctagataaggggatagaatattttgagttgatgaaaaacgatagttcc

SEQ ID NO: 1847 - DNA, 161 bp, Parthenium argentatum
tcttgtagtaatttctgcttgtagtcatgtaggatggctagataaggggatagaatattttgagttgatgaaaaacgatarttcccttgaaccattgaaagccgaacattatgcttgtatcgtggatctttatgctagagctggctatttaaatgaagcag

SEQ ID NO: 1848 - DNA, 161 bp, Parthenium argentatum
ccgaacattatgcttgtatcgtggatctttatgctagagctggctatttaaatgaagcagaagaatttattaaaagcatgycaatagaaggcggacccgaagtttatagagcactgttaagtggttgtagacttcatgaaaataaggaaactggtgtccgt

SEQ ID NO: 1849 - DNA, 161 bp, Parthenium argentatum
agacgtaaaggactgagtaagctagctgcacattcttattataaattattaataaatatatatttaacttggcacatagtwaaaaaaaaaaaaccatgtttgagtactgtgctttgactaagagggtaacttgtgctttgacttttgacactgatcaatac

SEQ ID NO: 1850 - DNA, 161 bp, Parthenium argentatum
aagcttccatgccctagctaaattcagttgattaatcatgtgacaaatagttcagtttgtttttttaagcataagggtaayatggtcatttcacatggatttaacttttaacgtcttgagtgaaaaggaccaaacacacacgtgttactgtttggaaaaca

SEQ ID NO: 1851 - DNA, 161 bp, Parthenium argentatum
aataatatagataaagatacctaataatattattatatattattaacttaataatatttttgaaattaaaaaattgaaggwgataatattgatgacgtgacttattgtggtgtgagaatggtatgagaatcaatatggtgcgagtattatattgaaatata

SEQ ID NO: 1852 - DNA, 161 bp, Parthenium argentatum
tttgaggacaaacattttttttacgaatgggagaataatagagctcagggtgatccgttacccatcgcctcaatccgacaragaatttacaaactatctgaattagatcaaggagtttatccgaatcttggtttggaattgtagttgctctatgaagttat

SEQ ID NO: 1853 - DNA, 161 bp, Parthenium argentatum
gggagattgagctttgaaaccagttcgtgaatggtgattggttttccatgatcatgaacgatgtcgggtattcttagttckagtgcacaaccaagagacatggaggtggcatagttgaggacatgtctgtatatatgacttgagcttcaaagaccacattt

SEQ ID NO: 1854 - DNA, 161 bp, Parthenium argentatum
gttgtcgagttgatagtaaataaagataggtgcggtcattttccgagggactttcagggttcggacacaagttttgttcgyattgttgctccgaataaacaaatctgggttagtgctgtaggcatcgggaagacagtcatcgtcataacggtcaacgattt

SEQ ID NO: 1855 - DNA, 161 bp, Parthenium argentatum
ccatatatctatataccccttcgatgaagtctctcccgttagaatcagtatagaatgtcttgtttgtctttaagctagttrtgatctgagttgttaattctttcccaacaccatcatctataggtataggtccaacctagtaccaaattgtagaaatatgt

SEQ ID NO: 1856 - DNA, 161 bp, Parthenium argentatum
ttgtgattcgtgtcggtgtcgggatttgtcttaaaactaaaccatgtctcttcacttttacaagattaataagggaatttktcatgaaaaaaaatgtttagagatgacttgggggtaaaaagagagttttctacttgagacctatggtgaatatagaattg

SEQ ID NO: 1857 - DNA, 161 bp, Parthenium argentatum
aacatttatcagctggactctgatacatacataagaatacaactattataacgctcttatgataagaacatatacaatgtyacgcaagctgcacctggctacattgtattaacaattaaaattagttttctttgtacaaaacatactcctttattccacaa

SEQ ID NO: 1858 - DNA, 161 bp, Parthenium argentatum
catcagttgatgccgctggtgttgatgaagaaccttgaccttgtgtttcttgagaactagccataataataataatcgtgrtagaatataggatagaatatggctgtgattttattgattgttattgttgaatcgtgggtttagactttagactttagaga

SEQ ID NO: 1859 - DNA, 161 bp, Parthenium argentatum
aactagccataataataataatcgtgatagaatataggatagaatatggctgtgattttattgattgttattgttgaatcktgggtttagactttagactttagagaggaagggccgaagggtttgaactttgaagagaagaacataaatcgttctttgtt

SEQ ID NO: 1860 - DNA, 161 bp, Parthenium argentatum
acaaggaatttcaaacacctcaatgatacataatattccactaaaattttgttcactaatgataaaacttaagtgcacatycacttaaatttaattccaaaaaaaataacaaatttgtcgagaaaacccctttaaaaattcttatgcgtgttcttacccat

SEQ ID NO: 1861 - DNA, 161 bp, Parthenium argentatum
atttaattccaaaaaaaataacaaatttgtcgagaaaacccctttaaaaattcttatgcgtgttcttacccattatgcatmttatgcgtaatgaagtttaagagcttcaagatagttgatggtcttatacagttgcttaaatacattattattaaccaata

SEQ ID NO: 1862 - DNA, 161 bp, Parthenium argentatum
gtaattatgcttccaagaaaaacattaataaactggaaaatataatatcttgttgcagatctcctctctaaagcagatatygaggtaaatccttcaaacttagacatcatcattaagattgaaggtagaatgatgaggaaaattttcaaagcaattcctgg

SEQ ID NO: 1863 - DNA, 161 bp, Parthenium argentatum
accccatagagacggggaggaccagaaacttttaaaactctttctagaaagtcagatggtgggaccaagaataaggtggtyccgtcgccaaattttacaacacctgctcggtttcgatcacccatgtattgtagaaattcggtatatgaaccgaaatcctc

SEQ ID NO: 1864 - DNA, 161 bp, Parthenium argentatum
aattttacaacacctgctcggtttcgatcacccatgtattgtagaaattcggtatatgaaccgaaatcctcttcactatcrggtaaaaagaaaacgatatcaaaaccaatagcatctgcgtaatgtttttccagcatgtccaatcctgttctagccgagca

SEQ ID NO: 1865 - DNA, 161 bp, Parthenium argentatum
gtaattgaacgacttgcttgtccatgctttataaacttccacggctatttaacgaaattacacggtttatggactatttgycgaaaagtaaattatccaacagccgaaacccctatgttttagggcgtttgttgttatcaattacacatgtgtaaaaattg

SEQ ID NO: 1866 - DNA, 161 bp, Parthenium argentatum
gattgttcttctaggttttgtttatcggatttttgaacttgtgaattttgataactgatccatttaaagtttgggatggtmaggttcgggtaattcggattggggttagttcaggtcggatagttcggttttcggtttagatgtaaaataaaataaaattg

SEQ ID NO: 1867 - DNA, 161 bp, Parthenium argentatum
atacattacttgttggcaatatagaaaatatgtacatgtgcatagtgtaatatttgcattttaaataatttttttgtgggygattacaggttacgaggctggtaagaaaaggtgcaaataagataactttgagcatcggtgatggtgcaaatgatgttggg

SEQ ID NO: 1868 - DNA, 161 bp, Parthenium argentatum
cattttaaataatttttttgtgggtgattacaggttacgaggctggtaagaaaaggtgcaaataagataactttgagcatyggtgatggtgcaaatgatgttgggatgattcaagcagctcatgttggtgttggaataagtggtttagaaggaatgcaggc

SEQ ID NO: 1869 - DNA, 161 bp, Parthenium argentatum
ggccctgctacttgtcatcatatagacagtgggcacacgcgtcgcttctagtccggattctgacttagaggcgtccaaaastcagctagaagaacgacctggatcacttttacacttaatgggttgactggtcatctagtggaaccttcatgtcaacagtt

SEQ ID NO: 1870 - DNA, 161 bp, Parthenium argentatum
ccattctattaaaaaaatattctcaaatggatttttatataatacttcagtatcacaaactggttaattttggtgattacracaatgatacagaattaaacttgaaatattacacatacattcagaaaggaatagtgcatacactggtttggcttcggctg

SEQ ID NO: 1871 - DNA, 161 bp, Parthenium argentatum
agcctaaaaaaggggggaggggggggcgaagctcaatatatacaaaattttcagacgaaaacggggaaatttacactactragccgaaaaacaggggggccggggcaccccctcccccatctaaagcttcgccaatgcacatgaataagtaaaatgtgtaa

SEQ ID NO: 1872 - DNA, 161 bp, Parthenium argentatum
gaagaccagttttcaccaaatgcaagcaggacttttcccttataaccgtatactggaccactacaaaatgtatgtaaaaartatatttaagatttgagataccataaaactataaattcaccacatgcctaaaatcttccaattaaagttaaagatacctt

SEQ ID NO: 1873 - DNA, 161 bp, Parthenium argentatum
ttaactctgtcacctgccaaatgatggttttcattacacaaatgaagatatgagtaacaaacaccatatagaatgcaagtrttatatagctatataccttctttgaaagtataacgttttgatgatgcagtggacgcttcctgttttggttgagcatgaga

SEQ ID NO: 1874 - DNA, 161 bp, Parthenium argentatum
cagtaggataataagatgcaggcacaagtcttcaggccgtcatttcttcctcctgcctccaattccatcacaaccctcacwacatcttcaaacctttcttttcctaataaattcccatgtcagtagtattcaccatatatatatatgtatatatatatctg

SEQ ID NO: 1875 - DNA, 161 bp, Parthenium argentatum
gtcgatacacttctgttttatgtacctgaaaatatgaaggcacgtgtgaatcaaatgaagattaaaatcaaaacgaaaacwaaaatagtggaaataaaaagaacctttgtaagagatcttggtagagataaggcaactccaacaacttaaacgcgattaca

SEQ ID NO: 1876 - DNA, 161 bp, Parthenium argentatum
ttcagtcgtctcagcaacaatttttattctgatcgagccttgcattattggcggatagtttttctttcggttgccgttttyccttcaaagtctcacaacaatctgttcttcctcgtgaaccattaatattgtttggaatatagtgtccgacaaaatcatta

SEQ ID NO: 1877 - DNA, 161 bp, Parthenium argentatum
catgtaaatgctatatgttgctacaaggatccataggcaccagagcgaagcaaagatgcttctatccggtcgttcttattyggcttataagcacatgcaagcccggttagactcgcaacataataggggggaagatgttatcgtgagtgaccagactctga

SEQ ID NO: 1878 - DNA, 161 bp, Parthenium argentatum
tgtttttggtgtatgatcaaacaatcaaacgttgtatacttcagttatcgttttgtttattgatcattccaaatggcaagytttctccatagccatgacggtaaatatttgtggcgcttttgcaggaaccagaggacgtttcgtccaaagaagagtgcacc

SEQ ID NO: 1879 - DNA, 161 bp, Parthenium argentatum
taataatcctcctaatggttaatggacacttagttagctaaataatttattcaaaaaaattttaaaaatacaaaattactwtaacttcggcaataaattttttaaggagcatatataagaccaggaaccaagtggaccaaccataaaccaaattgatttca

SEQ ID NO: 1880 - DNA, 161 bp, Parthenium argentatum
taagataagttagaacccaaacaggctaaatcgacccattcattaagtaaattggttgatattgtcttctctattgtaaastaagaattaaatatggtagatccagaagcttaagttgaccaacccggggttgaaaatgacttcctgaaagtatttcctct

SEQ ID NO: 1881 - DNA, 161 bp, Parthenium argentatum
gaactggattcaaaaaccggataacgtcataaataacttagaaaccaaatatatgaatatataaccaattagcaatacttyattttctgtgcggatttacaaaagtattaaactatgaagctttcgaatactgaagtgaagcacgtgatgcatatatgctg

SEQ ID NO: 1882 - DNA, 161 bp, Parthenium argentatum
tcaataaaaaggtaccctagcgcctaaatttcatcttcttggccttaatagtttttagtgctatcattgttcgcgagttcrgctcaactcccttcgatatcatctcatcaacaagtgttattgcacgctgcctatatcccatagagcaatagccacataca

SEQ ID NO: 1883 - DNA, 161 bp, Parthenium argentatum
acccgttttgacctacccgctctttttaacactgctattacaaacaatgtaataacctcacctgaaaaacactagaagtcracgaagactctccatgcttagaaaatccaaacccacagcctttgcataaccttatgagtatatttgttacaggaatccat

SEQ ID NO: 1884 - DNA, 161 bp, Parthenium argentatum
ggaaaccagaagctcatactgaaaaaacaataatatataaataataaataataataggataaacgtacttcgctcgatcaraaatccaaacgtaaaccaactaatccatattttgcttgattttgccatccatagtattcaatgacacatcccgtaatcct

SEQ ID NO: 1885 - DNA, 161 bp, Parthenium argentatum
tcatatacatttatagttattttcatcttgagcttggctcatgtgtagtttactaacctcgatatatgaagctcgggctcmagctcgtttattgaatgagccccgtataagcttgagctcatttaaccttggctcgattcgaacttttaacgaactgatat

SEQ ID NO: 1886 - DNA, 161 bp, Parthenium argentatum
aggggtcgttcgggactaaatcgcatatatactcatctatcaaaacaaattaaaaattcatgaaatgcggccgcaacccayccgcgccatctaggtacgccactgcagttaactgtgaaaacatatggtcctagacttgtcagttgattatagctgctttt

SEQ ID NO: 1887 - DNA, 161 bp, Parthenium argentatum
ctaagttcacgggtataggtacccatttatggtcttatatggttgagtattacctcggggatgcccattacccgaaacccragcttaaactcacgtaaaaaaagggacttgaaatatcagatactcaactacatttctaataatttataatattattaatt

SEQ ID NO: 1888 - DNA, 161 bp, Parthenium argentatum
ctaagctggtaacttgtgttttgacactgtttatcatataaatgcgagttgaaatcaatataatatgttttagtatttagwtaaaagattttgcttctcgttacctggttacttagggtgtcatataatcagtttcatatcagctgcaggcctgcagcaga

SEQ ID NO: 1889 - DNA, 161 bp, Parthenium argentatum
tgggatttcaggtaaagcgggggacacctcagggttcccgcagggcaccacccgagtctcatgttaggacccatgcaaagmaaactcattcttagctgctatctgtcccgcagctgccagcattgttgcctttaactcttcaaggcgaatctcccacaacc

SEQ ID NO: 1890 - DNA, 161 bp, Parthenium argentatum
gcaacgaaaaccgtcataaaactgcacataaaacttactgttttgccaagaaggaatgctgcagttgcacctatcaccgcrccaatagagtcagcaagaaaacccataggcaaaccaaatagataaccaccacccagctggaagaaataccggtaaataca

SEQ ID NO: 1891 - DNA, 161 bp, Parthenium argentatum
cacctatcaccgcaccaatagagtcagcaagaaaacccataggcaaaccaaatagataaccaccacccagctggaagaaayaccggtaaatacatacatatatacataaatatatatacacacacacacacacaaacataacaaaataactatccaatggt

SEQ ID NO: 1892 - DNA, 161 bp, Parthenium argentatum
aacgactcggagtgtctcgtgctttttaaatccaagatcaatatattaagctttaaactgattctctctgtatattcttayactttgaatcaacacataacactctcaatgtcaagcttaaatctttcttgagtcaggctcgagattgtatcatgatggct

SEQ ID NO: 1893 - DNA, 161 bp, Parthenium argentatum
ctttgaatcaacacataacactctcaatgtcaagcttaaatctttcttgagtcaggctcgagattgtatcatgatggctastggagccatctagctatttttgagctacggttaaggaggtcgagccaacacatgaaatcgggtcatttaagttgtgcccg

SEQ ID NO: 1894 - DNA, 161 bp, Parthenium argentatum
tctagggttacagcgtgcttaattcaggatacgttttgaaattatttgtagctggtttatttgaagccagaacgggccaaytaattgtacatacagtcggtatgttttgtaactagggccgcaaaagacagctttatcaagttatgtaaggccggatggtg

SEQ ID NO: 1895 - DNA, 161 bp, Parthenium argentatum
cttgattcttatcaaagctcagtataccaaaagaatcataatcgaagaaagatcaaactcacaaaaagtcctgaacaagtrgtatactttatcccatgagatcttaaaaggagttacgatcatgtgtacgagaagcaaacatggtatgaataaaggtactc

SEQ ID NO: 1896 - DNA, 161 bp, Parthenium argentatum
agtctggtaagtggtaactaagtaatgaaacccaataaaaggtagcctacgcaaataaaggttctacagaagggcaaacawgttcataaacattgtcgcaaaaatattatatatcttttacattttagatattcaaactgaatttctttggtgtttaccgt

SEQ ID NO: 1897 - DNA, 161 bp, Parthenium argentatum
tgtttgccttctgaaatggcagtctgatcatgttaatcaaaataatcccatttgttgttcatatttaaactattataaccwaacctgcttatatcaaactacatgaatttcatgttgcagagattgaggcgcttagctcaaaatagggaagaaacaagaaa

SEQ ID NO: 1898 - DNA, 161 bp, Parthenium argentatum
gcaacatgacattctggtgatgtttaattagaaagtttggctgagacatttaaacaaacatctggtatacattaagaaacycacaagcgaaaactgaatttcaaaagtcattttaagactattgattcatttttgacatatcacaataaaatataaaaaat

SEQ ID NO: 1899 - DNA, 161 bp, Parthenium argentatum
acaataaaatataaaaaatccggtaaaaactgttactatgaagagtaatagcattccaaatatccaatttgggtatatcarttcccattattcctttttagtatttgcttctttatctcttgaccaaaccctactcaaattcttatgcacttgaacgaaca

SEQ ID NO: 1900 - DNA, 161 bp, Parthenium argentatum
acatatggcgaaaatttttaaaaatttgcaaaaacatataatattgtgaaaaaaaatagaaactatgcaatattttttttwaaaaaatgtcaaagttcttataaaattgcgaaaaatagttaggtgatagtttatttttaatggtagaaagtaataattgc

SEQ ID NO: 1901 - DNA, 161 bp, Parthenium argentatum
accaaataacgtttctatcatttcttcactaaacctgtaacaaattaatcatgttatggtatcttaccatataatgaatayaagacaaagaagctaaacaaatgagaacttactgaaatgaccctgattttatctgatgccaaaccatcgactgatcaggg

SEQ ID NO: 1902 - DNA, 161 bp, Parthenium argentatum
tgccaaaccatcgactgatcagggttagccataaccttatcccaaaagaacggctttagcttagctttagaagcatcggcrtcatcaccacttgaatgactagatccctctgacgggcgtggcggtcttaggctggaacctggtggtcgtggcggcagtgc

SEQ ID NO: 1903 - DNA, 161 bp, Parthenium argentatum
atgattaccaaaactgtatcgtttaattaaaatgataattcctttaatataaaatgatttaggacattttaagcttttgawtacacattaagcgacttttgacccgtttcattgttagctaatattagacatttgacccttatcaaaataatacaacccga

SEQ ID NO: 1904 - DNA, 161 bp, Parthenium argentatum
aaactgagtgtcatttgagatgacttgtaattgtgtaaatcatgttttctggtaactggacttcttttatgtggatgaaaragacttgacttgttcatatgcacagacaagtttggtccttttaaatggagggatgaaacgtgctcgggtcaaaataggtt

SEQ ID NO: 1905 - DNA, 161 bp, Parthenium argentatum
gattttcattcttttgattccacacagatgtgatacttgtttataaatctcttagcttcactgctatcttgatttatgatyccttactctaaattggagatgtttctgagtgattttattatgttgcttagaacctccaaattatgcatgtctggcttaac

SEQ ID NO: 1906 - DNA, 161 bp, Parthenium argentatum
tacaaaccacaaaatcactagcagcactacccacaaataccctcacacaacctctccctctttttctctctctcacacacwcacaagtcaacacacacacaaaggtatgcgggtataggaacctactacgggtacctgccagcctacccgcaagggggtgg

SEQ ID NO: 1907 - DNA, 161 bp, Parthenium argentatum
gaagttattatatatagttaataatgagtcccaaaatgcaaatccgaacaccccttaataacttctgtttaaatggaaatraaccatccctgttcaatttcaccagtgcaggcaaatcgaagaaaaatacctattttaattgatgctgaaagaccaaggga

SEQ ID NO: 1908 - DNA, 161 bp, Parthenium argentatum
ggttccttagtatcattattgtattgaaaatgtacaagtcccttaggaaacacaaaaatatcaccaatttgtaggctttgwttaaatagcttgttactagtatccacaaaccctacttggagagacccggaaacaagaaacataagctctgaagccctagg

SEQ ID NO: 1909 - DNA, 161 bp, Parthenium argentatum
aatttttaatacaagctaacgatttaaaaaaaaaaaaaacgaatctgctctaactgccctgaccaaaccgttttggcccgsccggccggcccacaactaattaggccggtttggttagccgtttttcaaactgtagttagtggctcggcctagaattattt

SEQ ID NO: 1910 - DNA, 161 bp, Parthenium argentatum
acctgcttaaaggacagtgaacgcccttgctagtaaaaaagttagcctgaagaactatatttttattttgatgaagctgawgtacaatgatctgcaggcaaggtgtcctgttatgttgtacagattagatagatattcaattaatttagcttttttctgta

SEQ ID NO: 1911 - DNA, 161 bp, Parthenium argentatum
cccagctactcttgattggcatggaattaatttgaattaatttttggttctaaaaccaaagcagaagcaacatgctgctcrtccaagcctacgtgttttttggcctttgttttaggtattctacatggttggttcttgtttcatggctgacaaagaacaag

SEQ ID NO: 1912 - DNA, 161 bp, Parthenium argentatum
agcaacatgctgctcatccaagcctacgtgttttttggcctttgttttaggtattctacatggttggttcttgtttcatgrctgacaaagaacaagtattttgatgatgctacggcaccatctcaactgccatgccacttatccatcgtacttctcaagct

SEQ ID NO: 1913 - DNA, 161 bp, Parthenium argentatum
aatctagtgttttcaagtcacagataatcaagttcaagtgtttgggtatagttaaaactttaaactgattctgattatctrattttttacgggtcagataatcgatttaggagtagctgcaacaaattcgaaaatacaggtcagataatcaatttaggagt

SEQ ID NO: 1914 - DNA, 161 bp, Parthenium argentatum
aacttacagtatcttaaagaatcccactcaaaacatctgcacatccaatacgggtcagataatcgatttaggaaactgcaycaaatttgaaaatacaggtcagataatcaatttaggagtagctgcaagtcggcaacaaacccgaaaaccttcaatatctt

SEQ ID NO: 1915 - DNA, 161 bp, Parthenium argentatum
agtagctgcaagtcggcaacaaacccgaaaaccttcaatatcttaaagaatcacactcaaaacatctgcacatccaatackaccttgtgcaacctgttctgttacaattggttgtcttgttctgaatatttcgtatcacataatcacttccaaaacgcaat

SEQ ID NO: 1916 - DNA, 161 bp, Parthenium argentatum
tttatacggaaaaaaaaaatcagcacttccattaggaattagtgttggattctttgcgcaactccgtgagttttgaatagytgctgaagaaaataatggagttcatatcagttctactacaatattagcttatgtgtaatggaaggccacatttgtacatg

SEQ ID NO: 1917 - DNA, 161 bp, Parthenium argentatum
aagaaaatacaagaagagctttaatgatgacttcagatcccacaatgacattaaagctaattgatacgattcaaagacttkgaattgggtactacttcgaagaagaaataaagaatatgttagaaaaatttacacaagtgttgcccgaagacgatatatat

SEQ ID NO: 1918 - DNA, 161 bp, Parthenium argentatum
aatgacattggatcatctctttcaaactttattttaaccggcaggaaaggtggcaacatcatagattcaatcttcactcartattcaccattatcattaacctctaactctattcgtcagccactgggctcatctgtttacctgaaacaaagagaccagct

SEQ ID NO: 1919 - DNA, 161 bp, Parthenium argentatum
gggctcatctgtttacctgaaacaaagagaccagctccagaaattctccgaacaacacatggcgatatcgaacccattgaycaaaaccgcatttcggtttgatcgggtttcagattattacaacaatccttacaagaaaaagctttacagaggagtgagac

SEQ ID NO: 1920 - DNA, 161 bp, Parthenium argentatum
tgtataagatttacgcatccaatttaatcgaaagcagtgacgcagttcgttattgtcctcttcaaatacgaaaatgtattrattctgcattcttaaaaatatcagtttagtagtttggatatctatctgaagaattttgctatgttgcaggcccttaagga

SEQ ID NO: 1921 - DNA, 161 bp, Parthenium argentatum
ccatggttctaaaaactaagaaaagaaaacagttttgaaaaacaattgtgataagttaacataatttcagaacttactgaygattattaagttttggtattttaccattttagggtcaaatgttgacactggtcgagtatgctctattgttataccgtgca

SEQ ID NO: 1922 - DNA, 161 bp, Parthenium argentatum
gtttcaggtgcagcatgatttcttttgattatcaaacttaggcgtcggacctagtgcctcataataataaacatttgaacytatgttatgttttggtttgttatgttatgttggttatttgagacaatttgtaattgtaagatgatgaaatacatgattga

SEQ ID NO: 1923 - DNA, 161 bp, Parthenium argentatum
ggtccttgacttgtaagcccaaacttatttcaaaattccttaagccagtaatcttcaatccttaatctttaatgacagttygcaattttaaatgatcccgtaatcacgcaagaggcatccgatgtggcagggcggcggcagccggtagcagcggaccgtag

SEQ ID NO: 1924 - DNA, 161 bp, Parthenium argentatum
tatatacatctgcatattttcttctttgaattcgacttgttttaaaagactttgtgaatgattggttttaatccatgagtrttataaggaattaagttcactaaattaacctaaatacacatgttttatgatttctgcgtaatcacaactcaaatactata

SEQ ID NO: 1925 - DNA, 161 bp, Parthenium argentatum
atgttttatgatttctgcgtaatcacaactcaaatactatatgaagggggttacacttagatgctagcccaactggttgtrtctattgcctttatactaggggcgggccgggtgttcgaaacctgtgtcctgtctccaacacgcagcctattattttcttt

SEQ ID NO: 1926 - DNA, 161 bp, Parthenium argentatum
cggaggttttatgcattaaaagtacactttgggcgttttcaaacccttctgacgggtttgctgttacctatttgaaccttwatagataaaatataacctttattgatccgttcatgggtaaacaggttgagttgccacctcctaactgttgtgaatgaaac

SEQ ID NO: 1927 - DNA, 161 bp, Parthenium argentatum
atctaactcaacggttttccccgattttagtagttttaattatattcctctactgtaaaaacgcgcgaatctttgatttamatgtatgttgttcttaggtagtcaatttcaatttttctaaaatttgtctaaactcggaactcataagtaatggacaaaag

SEQ ID NO: 1928 - DNA, 161 bp, Parthenium argentatum
cttcggattgcctcacgcttttttaagccaatgttacaaaccaaacacgatttacaaacctttgacatcaaagaatggttsttgattatgccttcgtctccaccaaatcagggcgagtccaaatatgagcaaagagatgcacccgaggcttgtactgatgg

SEQ ID NO: 1929 - DNA, 161 bp, Parthenium argentatum
ggttgtttctgataaggaaaagaaaataaaagttggttctgagggtgattcaaggatcacacaacaaaatagcaacagcaragaaggctctaccaatacttcatctaaggacaagtctaaggtttccgaggttcaaaaaccggattatattcatgttcgag

SEQ ID NO: 1930 - DNA, 161 bp, Parthenium argentatum
tgtcaatctatctctccctctcttacgttatatctgtaaacaagagttttaggtgagcaataacaaaaaataattattgcwgttatgttctctcaggtatggtgaccttcaaggtcttaacaagcaagcaactgctgaagtattcggtaaggagcaagttt

SEQ ID NO: 1931 - DNA, 161 bp, Parthenium argentatum
ttatgaagtccgccccccgaatggtgaaagtttagaaatgtgcttgcaaagagccgttacctactttaaagacaatgtaawatgacctttttttgtatattcaagttgaaaagaatctttagaatcgcttagcgtaatagaaaatggtgctgacaatgttt

SEQ ID NO: 1932 - DNA, 161 bp, Parthenium argentatum
ccagcatcttcggatggcattgctgtgagtcaactcgatagcgggaatccgtatgtaatggatataagtggcgtaaggggmgggaggaaccggataatcgacggtcctgtggagaaagttgcggagaggcgacaacgaaggatgataaaaaaccgcgagtc

SEQ ID NO: 1933 - DNA, 161 bp, Parthenium argentatum
aaataatgcgatagttgtcattaagtcaaaattagatactgagtacccagttaaaggtaaatcaaactgttgttaaatgtmaatcatgatggttttttatccggttttaacttcactgtggatgcatactttacaacaaagctaacttcttgctgtgctgg

SEQ ID NO: 1934 - DNA, 161 bp, Parthenium argentatum
gaagcggcttgatgttgattacattgatctttactatgttcatcgcatcgatacaaaagtccctattgaaatcacagttartttcacttcttttttattggagcttatttaataaatgtttgttcatgagccgagtttgagctttggtaacataaacaagc

SEQ ID NO: 1935 - DNA, 161 bp, Parthenium argentatum
cttggcttggcttggctcggctcatttacagatataatattgatgcctgattttaaggaagaaattgttttgtagatgggwgaactgaagaaactggttgaagagggtaaaataaaatatattggtctatctgaggctggtccaacgactattagaagagc

SEQ ID NO: 1936 - DNA, 161 bp, Parthenium argentatum
ttgggaactttatcgaatcaaaactcaaagctgaaatctttttcacttataaagtgtttgggaatcaaagatatagaccawgaaccggttgacttcactgaaagtcaatctttacgatcattgacgatcaagaactgcattggattcggaaactctaattt

SEQ ID NO: 1937 - DNA, 161 bp, Parthenium argentatum
attttagttgttctataagttaatattatgtaatcaaatgaaaggtatttaaaattacctgaggcagatagtgtaccccarattttgtcaagatatttaaaaatctcaaaagatgcttcctcaacagatatcaaacctgacccattaggccaatgagccag

SEQ ID NO: 1938 - DNA, 161 bp, Parthenium argentatum
gttaaataatcgaaacaggttattccttcttggtttggaaaaatacggtaaaggtgattggcgaagtatatctaggaattwtgttgtgacaagaacaccaactcaagttgcaagccatgctcagaagtacttcattcgcttgaattcaatgaatagagaca

SEQ ID NO: 1939 - DNA, 161 bp, Parthenium argentatum
tttttggcagagtattataattggaaaatggtgtttcaaatcttctaatatatcaacgagtttaagtaattagtaaaattytttttataggctgaatgaatatcttagggatattatactgttggtaggagaactgtgtgtgaatcttgaaagggcacttt

SEQ ID NO: 1940 - DNA, 161 bp, Parthenium argentatum
ctctcataacttaatcaagctcgagcttgagctcgagcctggtcgagctcggctcgactcatttcaccctagaagaaagtyaaagttaaagaagtgttccacaaaagggttaacaattattttagtactttatttatttgtttggtatggtattttggaga

SEQ ID NO: 1941 - DNA, 161 bp, Parthenium argentatum
taataaatccgtttggaccaatttggaggcgattagggctgcccggaactctccagaacagcccctaaattctggacagcktagacgcgtgtggaaggttcaaaatcagcccaacgtgaccctgggacagcctaaaacggctgcacaaatcagccccaatg

SEQ ID NO: 1942 - DNA, 161 bp, Parthenium argentatum
aaacgatttagatacgcgtagaaacacaataattttaagctctgcagaaatcaaatatcttgacaaatctaaagctccaayttgttaaaaagagagtcgaatgcaacatgaaatttattgaaaggtttaaaactacaaaacctggattgaaatccgaaagt

SEQ ID NO: 1943 - DNA, 161 bp, Parthenium argentatum
acatgtaaatcatatattcttaccatgggaaaagcaagataatatagtccaagtccagtaaatgtaacaagaggaaccaaygaaagagggctaagatacctatacatgattcaaggttgcaaaaatataactaaaaataaaaaaataataaaaaaataaaa

SEQ ID NO: 1944 - DNA, 161 bp, Parthenium argentatum
ataaaatgaatttgatcaaatcaaacactttacttgacaatgtttctccacacgccaagaaatccaagagttgtctgtaamgcggatgccacgacaagagcaccttgtatgcctctcatcgtttgtgcaaatctcttaaaagtacccgcgtcaaaccatat

SEQ ID NO: 1945 - DNA, 161 bp, Parthenium argentatum
accgctgtgtcaaagctatggccgacaaaacttaaactatgcatttaacatcacaccggcctaaatgcgtatacaaacaarccaaccaatgttatgtatcatggtaaatgccaatggaatggccgctttcaacaaaatttataacaccacgtgaaaccgtg

SEQ ID NO: 1946 - DNA, 161 bp, Parthenium argentatum
gagtcgatggggtttcatatgcagaatgttccctcacttaatcgtctcatgcttactgaagccaaggtaaaagtaaagttwattattttatcataatgatcagttttcacttactttttctttttctacttttttttacaataatgtttttcttttaaata

SEQ ID NO: 1947 - DNA, 161 bp, Parthenium argentatum
tttatcataatgatcagttttcacttactttttctttttctacttttttttacaataatgtttttcttttaaatatttgcwgacggacaaaatacaagtgctttttaaatttatatatatttcaatttttattgtaatgattgtaaccaatgtttttataa

SEQ ID NO: 1948 - DNA, 161 bp, Parthenium argentatum
ttgtaatgattgtaaccaatgtttttataaactgaccggatgataaacatggtgttttactgatttaagaattggatgtcstcataaataatataaagcttaatactatttacatggctttcatctctctatctctaacaggtgggggcttcaaatcctgc

SEQ ID NO: 1949 - DNA, 161 bp, Parthenium argentatum
gttattggcattaaatcctcatttttctcgagcatttactctcttggatactgtagctctcatttactatgcggtgagccrggtaaatgggtaacatctctgtagtgaggctaacagttgctttgtattgcacaactattctaaagtcccgcctaatcgcc

SEQ ID NO: 1950 - DNA, 161 bp, Parthenium argentatum
agccgggtaaatgggtaacatctctgtagtgaggctaacagttgctttgtattgcacaactattctaaagtcccgcctaaycgcccaccaaacacaaacacaagcacattgttgcaacatatacatattgctactcttgagaggagaagaattaaggtagc

SEQ ID NO: 1951 - DNA, 161 bp, Parthenium argentatum
agcttattgtttaaccccccaaaatagtcctggttacatcatcaactacacctaatgccatggctctaattcaatcatttrcagcccttcgttttctcagcatcaactagacctaatctcatcatcatcatcatactcagtaaatcccaccaatagcaaag

SEQ ID NO: 1952 - DNA, 161 bp, Parthenium argentatum
cagtttccatgacaggtgatccttctttcttttttctttctagttttataatagtgttatatatctcgcaatctcgacccrcttacttaaaagggctaatcaggtattattttatttttttgatgggtcaaacagttcgatagctgcccaaaatgtatttt

SEQ ID NO: 1953 - DNA, 161 bp, Parthenium argentatum
attattttatttttttgatgggtcaaacagttcgatagctgcccaaaatgtatttttagagcaaaaaccatactaaattgygatattgaataaagtttattattttgataatttatatatatttttaatgtatatatgttgttgatttattgtgataatgt

SEQ ID NO: 1954 - DNA, 161 bp, Parthenium argentatum
cgtagaattgcctttttttcttcttttcgttaatcattcagttgttgccaacggtttctttgaggtcggaatcgaaacgtytgggttatcacaacgatggaacggtatgatagccggtatcatgaaatcgttcacattaacaaaattcgtttggaccagcg

SEQ ID NO: 1955 - DNA, 161 bp, Parthenium argentatum
tgtgattgtttttctgcgctgcttaaagcatccagaaaatctgctttgacctgtaagaacaataagtatttcactacaacrtgaaaagtagaaaagtaagaaaatagcaaatgactaagcctcacatacaatttcacacttcattactaagtcttattgtc

SEQ ID NO: 1956 - DNA, 161 bp, Parthenium argentatum
ttattcaatagaacgattacactgagaaatcaaaaaactaacaaagaagacgggatggctaaacagcttattcgagaaagrtgctgagctttctctctcccaaaaagctgctcaacgagtgcaagagcgtattccatggtggttcccaagccttgactagt

SEQ ID NO: 1957 - DNA, 161 bp, Parthenium argentatum
ttattcctcccaatttcgccatttctataactatttctaaacccaacataaaactcaagagccccaaacccgtcttccatycttctgtacgccaacaatgctgtcgaatacgaagctggagacggagacaaccccttcgttttaatctcattaaaaacttc

SEQ ID NO: 1958 - DNA, 161 bp, Parthenium argentatum
tgtcgaatacgaagctggagacggagacaaccccttcgttttaatctcattaaaaacttctaacgcttttgtttcgtcccyttgagctaacgaaatccccatcaatgtgttgtaagtcaccacatttggaatcacaccactgctaaccatatcattgataa

SEQ ID NO: 1959 - DNA, 161 bp, Parthenium argentatum
cattgataaccttctccacatgatcaaactcttccgcttgtttaatcgcacccaaaagactattatatataaacaaattcrgccccgggctcttcagcttcaaccattctacaacagcaacagctgcagccacccttttatccttaccaaaagcccgaatt

SEQ ID NO: 1960 - DNA, 161 bp, Parthenium argentatum
gaggtttattgttaaggtagtgaaagagctgttatgcaaaaagaaaaaatgaaaattgatatgttttatgcaattagtttytcaataatattattaaattattaaaatacaatattattaagttattaatagataatctttataacccatttattctataa

SEQ ID NO: 1961 - DNA, 161 bp, Parthenium argentatum
cagatatcatgataaaatagttgaggtgctataggtgtataactatgaaatagagaggctaaagcccatggtgtgaaaaargcgggaactatatattaaagcatatttgcttagcagccacaaaccaaaccctagcggccacccaccatgaacaccatctt

SEQ ID NO: 1962 - DNA, 161 bp, Parthenium argentatum
ttcatattctacaccaacatatggtattcatgtgtatccgatttatgtctgaagacgagcaggtctatacgtacataactwtaagtatgaaaaattttagatagcttacttgtattcgtattagactattagtagtcaatgcaagagaacccaacagtggc

SEQ ID NO: 1963 - DNA, 161 bp, Parthenium argentatum
cattcttttagttaatataaaaaaatgattaattaactagtttcttaaataagtaaggttcctatttgatttcacgtgtayacaaatatagaatttatagcatgtgaaatatacgtgtaacagtcatcacaaaaagaaaaaagttgttaaaacttacaact

SEQ ID NO: 1964 - DNA, 161 bp, Parthenium argentatum
aacatgacagtcttggttacataaaagtcaatgccataaaatatatatctatatgtgtatgtgttaacattaaaacgatawaaaattcgcaatttttctggtcgccaacttaagatgagtgaataatcaatatataataaaaaaaatatgctgaaatttga

SEQ ID NO: 1965 - DNA, 161 bp, Parthenium argentatum
ttgtggtggtcggcagtggttgtagatgataaaggggcggtggctgtttatactgacagtgattttgttgagtggtagtgkaggcaggtaggggtggtggtagcaggttgggtcgatggtagcaaaggtaaataaagagagagagagagagagagagagag

SEQ ID NO: 1966 - DNA, 161 bp, Parthenium argentatum
gacagtgattttgttgagtggtagtggaggcaggtaggggtggtggtagcaggttgggtcgatggtagcaaaggtaaataragagagagagagagagagagagagagccatggttcccaccgctcaccagcccagctacccatctctgccgccattcccct

SEQ ID NO: 1967 - DNA, 161 bp, Parthenium argentatum
ttgccgggtgtcacaccacatcaaacaacatttaatactttgattcattcccacatggcaaccaaacaagacatggaatgrtaatgattcattccattacctcgtccattccaatccttcatccattccattaccccataccaaacagaccctaagctaat

SEQ ID NO: 1968 - DNA, 161 bp, Parthenium argentatum
aagacatggaatggtaatgattcattccattacctcgtccattccaatccttcatccattccattaccccataccaaacakaccctaagctaatagatacataatgactagaaatcatccttttcactccacatcaaaccatcatatctataccccatttt

SEQ ID NO: 1969 - DNA, 161 bp, Parthenium argentatum
tcacttttctcagagaagcgtctgaattcgcgtaccctgtaaaaatatacaggatcagaataatatttcagagaaaaaagmgaataagaaaaagaaaaccatgaaaagagtataactctggagcaaggaatatctcatcaattctaatttgagaagatggg

SEQ ID NO: 1970 - DNA, 161 bp, Parthenium argentatum
ttcagagaaaaaagcgaataagaaaaagaaaaccatgaaaagagtataactctggagcaaggaatatctcatcaattctartttgagaagatgggcccgctgagtcaactcgccccaagaaatttcggacacctgcatctgcaactttggctatgaagttc

SEQ ID NO: 1971 - DNA, 161 bp, Parthenium argentatum
cactaaaaaaccccagttactattttgttaaaaatttctttccaaagtatatgctatttacaaaaaataacgatgagaaakgagagtttaccttcattttccgtgctctccttgggaaaacaaccaatttagccttaaatgttttcagcctctgcacgtta

SEQ ID NO: 1972 - DNA, 161 bp, Parthenium argentatum
cctgcagcctgtgtaaaaaaacaaaaataacatttagtgatttgggttgtatcatacacaaatcaataaaatagtttaccrttgcctgtatcacagaaaacaatcttcctaacaatgatatcatctcatgtgtctaattaaatataacatgagtcctatac

SEQ ID NO: 1973 - DNA, 161 bp, Parthenium argentatum
tttgaaccagcctaaaaaagtactctttctgaattttgacacaacccagttttgtcatgtaacacaacccacatgaaatgyaacagatgaaaccctgataaatcattttcttcaaaaactatattattactgaaataatgtttgtaatcatatgtcaccct

SEQ ID NO: 1974 - DNA, 161 bp, Parthenium argentatum
tcatgtgggcccaaaccgttttgaccctttacacaaacccgcctaaccagcccatcttccacatcaaattataagttaatygaaaggaggggcaattaagcatataatgttgcaggtttaccttcattccaggcatttggacccactcaatagcagttcca

SEQ ID NO: 1975 - DNA, 161 bp, Parthenium argentatum
ttgtcaattgttaagatttactaaatttattaggtttttttatggacccaggacttgaaatcaagcagaaggttgactcayccctttataatcacacgctcgccaccattctggtggaatatgcttctgcggtaagctcactctggtttgttatgcgctat

SEQ ID NO: 1976 - DNA, 161 bp, Parthenium argentatum
gtaaaattaacttgatttttatattaaaacctattagcccaattcttgaaacaatcatttggatgcagggaaggaataagrgtatctttaaatgtttatttgactatttacttaattatgtcattttgtgctgtacatttgtgtttgtttatgctcgttcg

SEQ ID NO: 1977 - DNA, 161 bp, Parthenium argentatum
cagatcacccctaagctaaagttatcaagtaaatcacacacatcaacataaacagaaaaagagatcgtcatccttcgaaayatcaatctaagctctcctgctttcgatccatttttaaggagaattcataagagtagagaaaattattatgtgaaaataat

SEQ ID NO: 1978 - DNA, 161 bp, Parthenium argentatum
gagtagagaaaattattatgtgaaaataataactaaagtggtttataagagaaacgtgatttcctttaattattttctttwtttcctttgactgcttttaaacggtgataaaataaaaactgtctgaaaatcagttgggtgaaggactcgcgaggcagcgg

SEQ ID NO: 1979 - DNA, 161 bp, Parthenium argentatum
ctccaaagaggcacaaaagtctgattaaaaaaagaaaaaaaatcaggaaaggaaaacatgaatgattgtatggtatgttayttgtagttagaccattacatgattaagagggtactgaaccagcccaatccattgcctttggcacccaaaacattggcaca

SEQ ID NO: 1980 - DNA, 161 bp, Parthenium argentatum
ttcagaaattgtgtcagactagcaattttatattttttttacctgagacgaacatgtttattgatttggaatttgtctctrttgtgatcgtaggttggttgtaaaataaattcgttccttcactgctatcatacggttgatggaacagaggtagtcggtga

SEQ ID NO: 1981 - DNA, 161 bp, Parthenium argentatum
ggaatttgtctctattgtgatcgtaggttggttgtaaaataaattcgttccttcactgctatcatacggttgatggaacaraggtagtcggtgattgctcctgcaatattggtaagtaatatctaatttcatttttgttgatttagactctgcattgatga

SEQ ID NO: 1982 - DNA, 161 bp, Parthenium argentatum
cttttctacatttaagtttgtaagtcatgacccatagagagtccttgttagtcacaatatttcagatatgatcatcaaagktgtattccatgtactcagatcctatgtctaacccacttaatttaccatttaggaaaatactcttattaccattgtaacag

SEQ ID NO: 1983 - DNA, 161 bp, Parthenium argentatum
tacaaaaaagattcttatatacaatcccttttttttggtttctgaaaactgattctttcagatatgtatagagttactaaytgataaaacacaagagaatctaaccaaagaaaactgaataccttcttccccttggaggcttattgacctcggtaacaagt

SEQ ID NO: 1984 - DNA, 161 bp, Parthenium argentatum
gacgaccaacaatgctccgcccatgtattagaccatttaatttacacaagtgtataaataaaagaaatacaaagaaaaatratataactcataaatctgtaaacaatgatggtcaatatgtttccatttttgtagcataccaacaattatagtgttttttg

SEQ ID NO: 1985 - DNA, 161 bp, Parthenium argentatum
ttgggtcaaatttgtttccaggaaacagaggaaatgatagcagatgttcttggtgtagaagtatttagacagacaattgcwgggaatgttcttgtggggagttattgtgcattttcaaatagaggtgggttggttcatccgcacacatcagtcgaagactt

SEQ ID NO: 1986 - DNA, 161 bp, Parthenium argentatum
acgcaaccgttgatggggaagagaggtaccaagatgatggatacttcctatgagtggtagcttccacggcccgggggctaratttgggattgacttttttgttagttttagtaacatggatataaagatgagaaaggcaaccaaaatttgtaacgggtgaa

SEQ ID NO: 1987 - DNA, 161 bp, Parthenium argentatum
ggctggccttggaatctcgcgagctctcttcttcattgtcaacgcatggttcgtcgcttttataggatcgtcgcccgatawcttgataaataattcggatggtcgaacaacggctgaggatttcttgacaccgccgaagtggattccttttccgagtaaac

SEQ ID NO: 1988 - DNA, 161 bp, Parthenium argentatum
attcggatggtcgaacaacggctgaggatttcttgacaccgccgaagtggattccttttccgagtaaactatgctaccgamagtatgaggccaattggatgatggacggtctttctgttaatgcgtcgggtgtttcggatgcgtatcgttcgggaatggtt

SEQ ID NO: 1989 - DNA, 161 bp, Parthenium argentatum
gctgttccgacttcaagggtgataggcacgaggtttttgatgttgctaacagtcatggcagggtgaaacttggagtccatrgctgctgtgagaaagaaaagggaacaaaagaagcgaggagagaggtggttgttggctgaagtgtgcaggggtaaagaacc

SEQ ID NO: 1990 - DNA, 161 bp, Parthenium argentatum
tgtcgcgaggttaacacagatgcaagccttataggagaaggtttatcaaccacctatagagaaaaagaaacaacgtaaggkaataatatcatattccatgtactacatgtgacgagtgagtcatcttagaggcaatagaattggtagttggtatgcaatac

SEQ ID NO: 1991 - DNA, 161 bp, Parthenium argentatum
aaattccatactgaactgaaggtgcatttcccacaccgccaactgacatttgaggcattgctggtagagtcccaaaaggayttgtaatagactgcggttgtgggctctgattggcaggcctgccacattaaaaataggaaagcattgagaagttcccaaca

SEQ ID NO: 1992 - DNA, 161 bp, Parthenium argentatum
taatcctcggatattgtttcaaaatacaacacctatatgtatcttatcccaccaagatacctttctgttagcttcttaccrttatgtagaatatgttattgatgttcacacattcttgtcttttggccagttaataatatatgcattttgttatgtactta

SEQ ID NO: 1993 - DNA, 161 bp, Parthenium argentatum
gtagtcataacaatgttattaaactgaggtttaaaacccaatcatatttgtactaaataccatattacacaaaatcaagasataaaaagagtaaaattttagataaatatgtgaagtgcaatacctggtttcttgagtgcctctaaatgctataacaatag

SEQ ID NO: 1994 - DNA, 161 bp, Parthenium argentatum
agcaattgaaaacatatcaaacaagttacacttatcaatccaacactaccttttatgtcgtgtgtagaattttcacctaawaaaatatgcattaattatattcctttcatcctttttagaacatgacgtgtttcttctatgcctgaagctgtaaactccaa

SEQ ID NO: 1995 - DNA, 161 bp, Parthenium argentatum
ttttatatatattatagtgcattaatatctatgcgacatcttaacaaacattttatcactttatattagatttgtctatcycggaaagcttccgggatataacctagtagtttgatatgtaaaacatatgagaaagacgcaacttctggtttaaaatagat

SEQ ID NO: 1996 - DNA, 161 bp, Parthenium argentatum
tgtgtaacctgcctgctaaattgttctcgtcattaaaatttgttatcttaattcaggtcaatataccgagtttgcttctamcacgcatcaaaatggacgccctacagacaatgggaacagtaagatcattgcttatatcatacttttttaaacaatctcaa

SEQ ID NO: 1997 - DNA, 161 bp, Parthenium argentatum
tggcttcagttgaatccagttttgcaagcttccaagcactgattcgaactggacggttaggtggtcgtttacccttgtcargtggctggaccgcatctggatccaccgttgatggaagccgtccaggctctagatgggctatgacttcatcctgatgttaa

SEQ ID NO: 1998 - DNA, 161 bp, Parthenium argentatum
ctatggtcatatcaaaacaattttatttaaccatgagacaggcaaatcgttggttgcgtatctacatttactcacctaaamcctgagtatatcatactgtaagcggttaataataatatatatttgatacaatgtcacgtaaattcaatatcagtgggaaa

SEQ ID NO: 1999 - DNA, 161 bp, Parthenium argentatum
attagccatgaaaaatcatcatcaaattaagcattcatgcttgtctatcccatgaaaaatctgatggtatcttttttgtawaatcgcggtatctagttgactaaacccacaagatctgaagctgtagatttatggtaacagcatcttaaggtttggtactc

SEQ ID NO: 2000 - DNA, 161 bp, Parthenium argentatum
atggtatcttttttgtataatcgcggtatctagttgactaaacccacaagatctgaagctgtagatttatggtaacagcaycttaaggtttggtactcacggcctggtgcgtttacacgaaacgattgaaaaatacaaaaaatacttaaccaacaacataa

SEQ ID NO: 2001 - DNA, 161 bp, Parthenium argentatum
aaataaataacttgtttaaatttgtatccaggtgatgcatttgttgggggatttttgtctcagttggtacttgaaaagccrattgcggaatgtgtgagagccgggtgctatgcatccaatgttattatccaaaggtcagggtgcacctatccagagaagcc

SEQ ID NO: 2002 - DNA, 161 bp, Parthenium argentatum
acgtctgaggtatatacaacagttaataaattttgttgcaaacttgcaaaggctgagtggttgattctgggttatatacaytgtatgatgtgtttctgatatgtgccgctacaccacgagttcataaaccacaaccaacatcctcagtaacatcttaatat

SEQ ID NO: 2003 - DNA, 161 bp, Parthenium argentatum
acatatgcctcaccttgcttctcccgggggatcgaacttgcgcctccaaggaggaacacaagccaaccaaccggttgatcyggggatattgacataaccatttgtgtaactaactaccaaaaataaaaactattactttttgtaactctacgtgtatagtt

SEQ ID NO: 2004 - DNA, 161 bp, Parthenium argentatum
tcaattgacattgattgcttgtatgatggaacagatttttcaataaaggtcacccgggcaaaatttgaggggctaaatacktgcttttttaagaagtgcattgagcatgtggaaagttgtttagcagatgggaatatacacaaaaacaatgttgatgatat

SEQ ID NO: 2005 - DNA, 161 bp, Parthenium argentatum
agttgggttcttgcacaagtgggaaaagctcaagtatggcatgcactaaggttccttatatactgctggagcaattcgtaygaatgggatctatcagaggaacccattcgtgcgaatgactcatggcatatcaagaaaaacaaatttaacttccaaaattg

SEQ ID NO: 2006 - DNA, 161 bp, Parthenium argentatum
gagtttgcccatgtttaacacttcttacgggtatgctttcatcctttaaaacatcatcgaggattttttgttgtaacttgyataaatcactatcatgttccttggtgatgtcctttatatatccaataaagctacttccttgaaatctctttcgaatgccc

SEQ ID NO: 2007 - DNA, 161 bp, Parthenium argentatum
aacaataatcaatgtcattactactgaatttgacaaatacaatttaaaattcttttaaagaaatgggttaaagatcaccgkctgaatggggctgctattactaatgccccagaccgaatgttgagcttatgatctcaactctcgaaacgacttttgttaaa

SEQ ID NO: 2008 - DNA, 161 bp, Parthenium argentatum
caatttcttttagaaaaaaacagtaaaatgtagagaaagatgagctagttcttacggtggttgttcgaggtctaaagtgarcacaatctctcaacctagccaaaggtaaacctttctttgataaaggataactctcttgatcaactatcccaatatgcaac

SEQ ID NO: 2009 - DNA, 161 bp, Parthenium argentatum
gttgtcttgcaagactgtgacatccaggcccgtcgccccaatcccaagcaaaagaatatggtcacagctcaaggccgaacygaccctaaccaaaacacgggcattgttattcagaaatgtagaattggtgcaacatctgacctccaacctgttcaagccag

SEQ ID NO: 2010 - DNA, 161 bp, Parthenium argentatum
accgaccctaaccaaaacacgggcattgttattcagaaatgtagaattggtgcaacatctgacctccaacctgttcaagcsagttttccaacgtatcttggaaggccgtggaagttgtactcgagaacaattgtgatgcaatcgtctattactgatgtgat

SEQ ID NO: 2011 - DNA, 161 bp, Parthenium argentatum
aacaaaaccaataaataacgataaaatgccaatattcattacatattaattaatagcattgacatgttcataaaaattaascaataaccttaagtaaacaaaagctataagcaaagtaaaaactttaaagtaatataatagttaaacaatgacacatgctg

SEQ ID NO: 2012 - DNA, 161 bp, Parthenium argentatum
ccagtaaggcagtaataaacctgattatttttcactgatgcaaactaaaattagcctcataacattaactttaccttgtgrtaaacagaagaaaatgccgaccaagcaaacggcaaaatagaaagacagcagttgtcttctgtttcaacagctttgctttt

SEQ ID NO: 2013 - DNA, 161 bp, Parthenium argentatum
tgtcacgagatgtctttgatttgtttctatgtttcctttctaaaccagattaagttttttagggaacactgtggtatccartgttccaatatcaaagtagcttctgcacaattgatgttttcctcatacctttgtagccttattcatttgatcatttatgt

SEQ ID NO: 2014 - DNA, 161 bp, Parthenium argentatum
atcttggaaagaaaccagatacatacgtaccataagtttttgcagatgtatagttaaaaggcatgacacgtggaacaataytgtcggttagtttgattggtttgagtttggcctgatgtgtcatctgcaccatctccttcaagtctccaaacagaaaccgg

SEQ ID NO: 2015 - DNA, 161 bp, Parthenium argentatum
cagacatggatacattgagccacgcaactgtaacgacacctgcagtctctcttggtcaaagtcaagtaaacttaggtacawacaagcaggctcaaaatacaaccgtgttgacgcctactgcaggctctcttggtcaaactcaagtcaacgtatgtaaaaca

SEQ ID NO: 2016 - DNA, 161 bp, Parthenium argentatum
tacaaacaagcaggctcaaaatacaaccgtgttgacgcctactgcaggctctcttggtcaaactcaagtcaacgtatgtamaacaaaccaaagtcagggtacaacaatgttcacaccacctgcagctgcagtctctccaggtcaaactcatgtcactggct

SEQ ID NO: 2017 - DNA, 161 bp, Parthenium argentatum
tgttttttcataagcaagcgcaatcgaacaaacacataaatttgaatttacatgtcgaaaaagatactaagccgagcatcraggtctttctttgtcatctcctcccaaaaatctttaacttgttctttagtgagcccgtcttcgacatctatattcctacg

SEQ ID NO: 2018 - DNA, 161 bp, Parthenium argentatum
gtgtagtggtttgaggtgcatttccctaatgggaggtcacatgttcgagactcggtttgaaggaaagtgtctttttttttycaaggtatattaaatataacaaatggtatttcatgttaaacataattggtttcataataaaacacaaattgggttcgtgg

SEQ ID NO: 2019 - DNA, 161 bp, Parthenium argentatum
caagttatgaatatgtaccttctaaggtaagatcatgaagatgcttactctcaaatcactttttttggaatttaaacatcyagcacaattcacccataggatatctgataatccatcgttggattcccccatttgaataatgatgtattaatccagattga

SEQ ID NO: 2020 - DNA, 161 bp, Parthenium argentatum
gtataacttcaggtagccggaggggatccccttctaaagcttatagcagttgactggtttaaacttgaaacttccagaggyaaagtggctttgcatcccaaatgccttgttcaggtactatattgatcattttttatggaatactttgtgtaacacagata

SEQ ID NO: 2021 - DNA, 161 bp, Parthenium argentatum
aagcccataattagttataaaagctggttccattagaatttataaaataaatgaaatgaattaacctacctgcagcctagmaaaagcttccttgcgcttctggtcctccccaagtgaccattgatattttaagtatgcatatattacttgtggtggcccat

SEQ ID NO: 2022 - DNA, 161 bp, Parthenium argentatum
gtttattctcgagttgggggtctctctggaagcagcctctctattccttggtatagaggtaaggtttgcctacatccaccmtccccagaccctattaatagctttgctattggtgggattttactgggtacgattgtttattaaagtgggtttggataggg

SEQ ID NO: 2023 - DNA, 161 bp, Parthenium argentatum
cggcttctaaaagtataagaggtaacatcatttatcatcataaatttccaacttaattcctttttcagaagagagtgtcaygatcttaaaaatatttgtttcctgatcaaaccgaaaacattatattagtgataaaatacacaaaagatttaacgaaatga

SEQ ID NO: 2024 - DNA, 161 bp, Parthenium argentatum
ccaataatacacggctgcttacttagaagctaggctctatgtctatcgtgattagtattttctttttatattaaaacaatmtaaaaaataatatagtttcgcgtttttattgcaagcaagtgattgatatgttattaacaactatgctctatctctcactg

SEQ ID NO: 2025 - DNA, 161 bp, Parthenium argentatum
gaaacaaaaattagattatcagtaaaaaatttaaagaatcaaggttgttgtcaaaccggtgctttaattatgtctgcgagwatcaagcacacagtccttgaaaaactgtgagagctgagtcgtgtagagctcgggctcatgcctaaaatgatcaacatgtg

SEQ ID NO: 2026 - DNA, 161 bp, Parthenium argentatum
gaaggggtataatggccaacaaattatataaatagacatgccaaagctttgattatgttgtaatagattacacatgatttstatttacttgaaaactaagttttgttccgtttatcacaactcatgctgtagtacttgttgcttccttgtatcttgggaag

SEQ ID NO: 2027 - DNA, 161 bp, Parthenium argentatum
cttgggaagcgaattaaatgtaggtggttcatggttcaaagttaaaaccttttaacggcaccctttggagagttgggttcmcgatgaagagtttttaacaataaaatctgcaaaaattgttagtactgaatcagttttgtttaatttaacatgggggtttt

SEQ ID NO: 2028 - DNA, 161 bp, Parthenium argentatum
cgatgaagagtttttaacaataaaatctgcaaaaattgttagtactgaatcagttttgtttaatttaacatgggggttttyggttgattcggatcgcagtgttcggtattagttagattgcatttttgtgatataggaagcttgtcattgaatcagttgta

SEQ ID NO: 2029 - DNA, 161 bp, Parthenium argentatum
aggcgaccgaattcactcctgaaactgcctccaggtgatgtaggatttgaacaatacaccacatcccattctgcatacaartacatgaattggtgagatttcagcagaatcattaacactaagaacaaaagctgttgctacaaaataaggccagggtcggc

SEQ ID NO: 2030 - DNA, 161 bp, Parthenium argentatum
ggaccttgccatacagcttgaaattggatgtatataagaattagtacatacacatcactttgttttgtttctatggatccwatatgaacctgttgagttcttagggtttaaacgtggtaattatgtttcagtgttagtttgagagatttacagcatcacat

SEQ ID NO: 2031 - DNA, 161 bp, Parthenium argentatum
caaaatggaatttgagctcacggagaaacttggctgttaacaaacccatactttcaattgaaagattgagattttatcaayataaaaaagcatacctttaggaattgttcttggatttttttattcgaatgggtaaactttatttgctagtgtttgttata

SEQ ID NO: 2032 - DNA, 161 bp, Parthenium argentatum
cgagctttgagcgagcagatctcaagtcgctcatgagcggcttaactcgtttccaccggtgtttatgcaacacgtagaatwatagagcacaaaagcatcattaaaagcaaaccctagttggcaagattcacacattcacacttgaactactcattgaccca

SEQ ID NO: 2033 - DNA, 161 bp, Parthenium argentatum
cccatctattcctgatgaaccaatgttttgtgggtctgagtccaggttcaagcggctcgagccactcaacgtcttctgcawacttctagcactatgggttccttccggttcactcccaaaactagccattgactcgtgcttaggagacgacagtagtaccc

SEQ ID NO: 2034 - DNA, 161 bp, Parthenium argentatum
agacaaacttacctttgatggggtgtcaccatgttatgggataaaagcgttgtctatatgaataaatgtaaagagtgtttwcatcatctgacatgttttaatccagaactggaatgaatgaaacaggatacatatttggatggccttgaagaagcaaagta

SEQ ID NO: 2035 - DNA, 161 bp, Parthenium argentatum
tgtgtttttgaaggtggtttgatagggctgccattataacccaagatgatacagcccatctccttacaaactcgccaaaaytatggcgaattgctactgtgcatagagtcgaagagctaaaatccatgattagactgttaccatttgtgtcaacaggaata

SEQ ID NO: 2036 - DNA, 161 bp, Parthenium argentatum
acaggaatactatttgtgatggcatattcacaccaaagtagcttcaccatcatgcaagctcgaaccatggaccgtcacatmacgaaaactagctcgtttgaaatacctccggctagcatggcagtttttgatgtcctatccatccttgttacccttgcatt

SEQ ID NO: 2037 - DNA, 161 bp, Parthenium argentatum
tcgtttttggccatctatggtgcacaaaactgtaaacaactcagatctcttatttacttgaacaaaaaactaacagaaaaytccacaatcaatagctaatctatctaacacaaccaaatagatcatgaactggatgatatatacaaagaacccaaagacta

SEQ ID NO: 2038 - DNA, 161 bp, Parthenium argentatum
aaagggaatgggtaaggcaaacaaactaacaaactcatcactaaaactatgatccccaatgcaacatatttgttatcgggstcactaatttcttcactcagtggagcaatgggcccacgttgtaaaaagaatatcaatacgacccaataaaatgccacgtc

SEQ ID NO: 2039 - DNA, 161 bp, Parthenium argentatum
taatgaatcttcccacttgttagtcatcagatacatgttccatagaagcatgtacacaccatcatcatacggttctaactygagcaccttctttgctgctgcttcagataattgcaggtctcttttaattaaacaagcattcaaaaccgacctaaaaataa

SEQ ID NO: 2040 - DNA, 161 bp, Parthenium argentatum
tcagaacgcatgtgccgagatattcttgaaaatttttgtgaaggtatatttttattattgttataattcttaatataattrttgttaatattatttattcggtacatttgatctgtatggacgacgatatttgaggactccgacctcaagtgacattatgc

SEQ ID NO: 2041 - DNA, 161 bp, Parthenium argentatum
atatctcatttttttgctgaaaaacatgaacaaaccacacacgtgactttggatataacctcaaagggaaagctatacgawatgtgctgaaagaattgtaagaacaacatacctgcactgaagagatctatagcagagcaatgggcagaagaaagggtggg

SEQ ID NO: 2042 - DNA, 161 bp, Parthenium argentatum
ttataaacatattagttctgtttttggaataaaagatataattttttcgattgacatctgctttagtatattcctcagttmttattgtttctttcttcatatgattgatcatttagtttataaaattgcgtttttatcaatagccatgtcaaatagattgt

SEQ ID NO: 2043 - DNA, 161 bp, Parthenium argentatum
acttttatctagggaaaattacttttatacgctaatacactaatattattttaaaacttttgatactaattagatgatatwaaatgttatataatagacttttgtttttttttattttaagaatagtattatttttctaatacataatatatttttacttc

SEQ ID NO: 2044 - DNA, 161 bp, Parthenium argentatum
tataatagacttttgtttttttttattttaagaatagtattatttttctaatacataatatatttttacttcttttctttstttgttttttttaatctcaggccctcactttttttttggccttgcgcctagcgcctttgataactgtgcttgatagtcgg

SEQ ID NO: 2045 - DNA, 161 bp, Parthenium argentatum
aagaaaacgcttgagataaatacgcattataatctaacaaagtttgacattggatattgaatgcgttaaatggttaattawtgtaggtacaccctggacagaggaggaacatcggttgttcctacttggtctccaaaaattaggcaaaggagactggcgtg

SEQ ID NO: 2046 - DNA, 161 bp, Parthenium argentatum
tactttaccttttattggtggctcataagaaactttaataagtatgttgttatatcatcctcaattaaatagaaagtaagkccaacctgcctcggcaagtgtaaagagaaagtaaggccaacctgcctcggtaaacttggacacagtatcaacattggtgc

SEQ ID NO: 2047 - DNA, 161 bp, Parthenium argentatum
agtttctagtctttttgtcacatgtgttctaaaggatgttctttatttaattattagaatgtagattttggggttaatatmttagcaaacagcgatctacgtagcggaacaaacgggtggtttccacttggtaattgtgcgctgagtgttgcagcaagcgg

SEQ ID NO: 2048 - DNA, 161 bp, Parthenium argentatum
aatacttcattgttaacgtttgctgatcttggggatatggtgtcaactttaccacgatcgacacacgatgggatttatcgygcaattgacatgtatcttaaggtcagtttttactactaaatttcaattcttttgttgggtttggctaatcaaacaactga

SEQ ID NO: 2049 - DNA, 161 bp, Parthenium argentatum
atgtatcttaaggtcagtttttactactaaatttcaattcttttgttgggtttggctaatcaaacaactgactttattttygaaatatttacaggaacgtcccgggataggaaagagcgaaaagaaacgaatctgcaggctaatggattgcaggaaactgt

SEQ ID NO: 2050 - DNA, 161 bp, Parthenium argentatum
actagcttccatatggatgtgttcttttctacctttagtaatagtctttaatttaacagaagaaaactgaacatatgaccrcataacatggttggtggtcctgccatgcaacatttgttgtttggcaccatattgtatgtggggatgtaagcctttcaaca

SEQ ID NO: 2051 - DNA, 161 bp, Parthenium argentatum
ggatgttcatcaccaaatgtctaaccttggctaaatgtgtgacacaggttgcagccagtgctactgctagtaatcccacayccaaagtcagcagcgatatagtccctcctgctaaacccaacctgattcttcttgctgaaaaaaagtaacaatttaatagg

SEQ ID NO: 2052 - DNA, 161 bp, Parthenium argentatum
gctagtaatcccacacccaaagtcagcagcgatatagtccctcctgctaaacccaacctgattcttcttgctgaaaaaaartaacaatttaataggcgtataaactataaagtaggagaaaggaaggcccggggttcaagtgacgtatcttttttccaata

SEQ ID NO: 2053 - DNA, 161 bp, Parthenium argentatum
caaggttctttggttgagttcatggtcaaagaaaccgaaaaggtctatgctcaggtaattcaaaccacaaattgacatcgytattatgtaaagattatatcatattatcaacataaacataacagccgcttttaacaggttggaaggtacacgagccctga

SEQ ID NO: 2054 - DNA, 161 bp, Parthenium argentatum
taaggtgaaagtactgttttttttttttaatcatagattttaaatatggaaaattaaataaacgtgttgtttattgtttcwttgtagaaaggtgcattcagtattgctgcgaaaactggagttccagtggttccaatcactcttgtgggaaccggtaaaat

SEQ ID NO: 2055 - DNA, 161 bp, Parthenium argentatum
tacatagggcttagtcttttcaataaaatttaagccttccataaaattctcttaagggctaaggccggtatcttcagcatwatacacacgcgcgcgcgcatatatgtatgtatacatacacaatgtatgtgtgtgcgaatgtgcgtatgcatatgtattac

SEQ ID NO: 2056 - DNA, 161 bp, Parthenium argentatum
gatgtagtagtattccaatctacctctatttatattcctatctggcagccaatttttcccatttttttctgaactatactkatggaccaatgtcaccattaatgtccctgcatactgtccgagtgcaattgcaatccaatataaagccattgctgtgcttt

SEQ ID NO: 2057 - DNA, 161 bp, Parthenium argentatum
cgaatactgaggaaccaaccaatacacgcttatgggtattatatgggttggttggtcgatcagattatgatctcttgctayttgttttcttttgatttctacaaacgaccccaccaatgttgcacaaatgtttatagcgaacccaacacccatccgctgta

SEQ ID NO: 2058 - DNA, 161 bp, Parthenium argentatum
ctccactacaatacagggagacaaccgaatcaaattaagcttcatactctcatctctcattagtcattatcgccccccatytcctgtctgccttcgatatttcaaacgatagtgctcgctgcctgtctttgctctcaataagccctatttgattactctgt

SEQ ID NO: 2059 - DNA, 161 bp, Parthenium argentatum
ggaatctctggactgtcaccgattaggtgaaaattaatggaccgattagatgaaaattactcggtgaacctctgaatagcractaatcataggctaggcgtgatttttacaaccgtggtatggtgtttagttattacgcatgacggcattaggtcattttc

SEQ ID NO: 2060 - DNA, 161 bp, Parthenium argentatum
tactctccactcacaaaggtaatcttttcatcaattccctcataccgttttattacagttccgttactctattaaattaawtaactttgttaatttttttgtgtattaattctatatatcggtctatatttgttgactataaatcaattattcttagctag

SEQ ID NO: 2061 - DNA, 161 bp, Parthenium argentatum
atggttccatgagaataggctgcaagggatccacttgagcttgagcatattagctactcctaaaccgaacttgattgcttkattttttttcatgatctatgattgatcttggctccaatcaattcaagattggttcatacgacttgaaaagttatataaga

SEQ ID NO: 2062 - DNA, 161 bp, Parthenium argentatum
ttgcttgattttttttcatgatctatgattgatcttggctccaatcaattcaagattggttcatacgacttgaaaagttakataagaattggaattaggctggtcgagcttttatgtttcaagcttgttgaattaaagcttgacttgaatgattcaagtct

SEQ ID NO: 2063 - DNA, 161 bp, Parthenium argentatum
aagcttgttgaattaaagcttgacttgaatgattcaagtctgagcttgagcccaataactttattagatccagactcattstagccttaggtattattggaaccttgtttagcaaagatgggcatcttaggtagaggtgcacaaaaaaacggggtatgagc

SEQ ID NO: 2064 - DNA, 161 bp, Parthenium argentatum
taaaatatggggggagaatcggtgaggtggaaattcatggtgaaccggagtacgttcgggcttgttgtgaagcgagcttgmagcggcttgatgttgattacattgatttatactatgtgcatcgcatcgatacaaaagtccctatcgaaatcacagttagt

SEQ ID NO: 2065 - DNA, 161 bp, Parthenium argentatum
ggaaggtcaaccaatttctggagataatcaactgattattgtgcttctaatgttcttaaaatatgcactgataaaattttytgagaagtggagaaaatttcttgagatttgtgctgttgaaaaatattaaaacatcaattagacatttttacttttaagac

SEQ ID NO: 2066 - DNA, 161 bp, Parthenium argentatum
gccactgattttgaatttatccgtcaacagactgttgtcacttcacactttaccggtgtttgcaggactttagatagtttrttaagtttaaaatgataactttgtttatgttatggaccaagtcaccaaacatgcagatgaacgtttacatagtgtctaac

SEQ ID NO: 2067 - DNA, 161 bp, Parthenium argentatum
ctactgtgcacacttctgtctcctctggttcagtgacttcagtcaccttattgtgctacaagtgaagacatacatgttggwccctgttttggtattataaaattatacaaacaagagggaggttcaaatgagaaccattaacaggagccactttttagccc

SEQ ID NO: 2068 - DNA, 161 bp, Parthenium argentatum
atcatgatcatgatcatcattatcaagtaatgaacatggtggaacatcatcaacattgttaatattgagtgagtcttgagyaggtgtagcctcatgaagaataaactttgcagattgcctccttctttggagccttttggatttacccttgtcattatctt

SEQ ID NO: 2069 - DNA, 161 bp, Parthenium argentatum
gatttggttatcggtacctatatttgacggcgagttgttgcaacatctaaaggacacgtagtggcccctgcaaggcttccsgcaacaaacgccgctgcaaattttgcaccaagaattgtagcaaggctactttcattaccagacatgcctagcaatcctct

SEQ ID NO: 2070 - DNA, 161 bp, Parthenium argentatum
tatgtaggtaattcggtctttgagatttgtatgcggtaggatatgtgatatataattatgcataaacatagatgatgtatraaccacaggattaaaagcaatttccattatcgaaaagactccaattctattatacactttgggcccctaaatacctttag

SEQ ID NO: 2071 - DNA, 161 bp, Parthenium argentatum
tctattatacactttgggcccctaaatacctttagtcggccctccacgtgtacgtagattaggttaagccatttttatagrattaaggtttggaatttgatgtactgcaacccgttgagtaatgtttattgtcgatgggtttgaactaaatattgggtttg

SEQ ID NO: 2072 - DNA, 161 bp, Parthenium argentatum
atgagaggatgggtggaccgacgcctaatgtctcttctcaagttcctagtaatggcgtttcttccaaattaaatggtcttwcttttgctgttagtgggactggagctaaagattctagcacccctgttgcaggaacgtccaatttgcaggcacctatgtcc

SEQ ID NO: 2073 - DNA, 161 bp, Parthenium argentatum
gatgtggatgaatcattaatatactacgattttggtatgatgggggagatcaagtcattaacaagagaaagattgatggaycttttttatgctgtttatgaaaaagatgcaaaaaaggttttaagttccgtagtttcctcgcctttcttataccataaagt

SEQ ID NO: 2074 - DNA, 161 bp, Parthenium argentatum
cggcaagattagcttacttgcagtttaggccgaagcgcctcaagaggtcctttgggcttctctacaccttgctgttaacartaacattatgttttgggtcaactaatatacaacttatattacggtaaaagttttaaaatagcagtcagcaaattctcatg

SEQ ID NO: 2075 - DNA, 161 bp, Parthenium argentatum
ctcgtgaatggatttataaatcttaccttagaaataagtggcggcttttttggcacaatacctccatacttcttcttgatkacttcctcctaagaaagcacaatgtaacaaaagcagtgattattattttgacacactagtataaaaaaataaaaaataaa

SEQ ID NO: 2076 - DNA, 161 bp, Parthenium argentatum
cttttgttttcaatcataccacgatctctttgttgttgaaaatatgagttttcaacatcctccattcgaatctttttcttyggtcgattattacttaacgactcattaggttcgtttagtttttcgacattggaactatatgattccattaatctctccaa

SEQ ID NO: 2077 - DNA, 161 bp, Parthenium argentatum
accgttttcgctcatgattagttgtcttaactcttaactagaatattcttgtcaaaggtatttgcattacagaatgtaacycatgcatgtatttatagatgcaagtcattaatatatattttaagttgttgaaggcaggttccaagcagcttcaatctact

SEQ ID NO: 2078 - DNA, 161 bp, Parthenium argentatum
gcagcttcaatctactttcaagaatagatttttatgttttaatgtttgcaacaagacaatgatcttggttttgaccattgrtagacttgacatgtgtcccttcactcactctgtgtgttttctattcatgggatctttgtaattaaccatttttataatta

SEQ ID NO: 2079 - DNA, 161 bp, Parthenium argentatum
aatcagagtatcaaacaaaccaaaagtcacgactaaacaatcagaactcagaagttgtaatcacattaatattttgtgctwaacctctaaagtgatgaatttaaataagcaaccccactccttatggtatgtgaaaaaagatgtttttccttctagtcaac

SEQ ID NO: 2080 - DNA, 161 bp, Parthenium argentatum
actaccttccccatatctccaaataaaataacacgttgcaatgaatcttgtccaggatatggagatgacttaaaagaatascttctactccaaacaatagatccattcaccaacctatgacccatcctgtaatcgtacctgcagcagaatgttaaattttt

SEQ ID NO: 2081 - DNA, 161 bp, Parthenium argentatum
taaatttttaaagaacatatcatttaagaaggaaaactgatataaatcgtacatggtgttaggccacaaattattcaagamactagtgtgtataaaaccaggatctcgccatccgacagtacttgcaggtggacctgcaagcgaataaaacttaatatatt

SEQ ID NO: 2082 - DNA, 161 bp, Parthenium argentatum
tgttaggccacaaattattcaagacactagtgtgtataaaaccaggatctcgccatccgacagtacttgcaggtggacctrcaagcgaataaaacttaatatatttattaagaatctccatttatcttttaacaaatttttatgtggttaaaacgtgatgt

SEQ ID NO: 2083 - DNA, 161 bp, Parthenium argentatum
tcagaaaagaaaataaaaagaatgattaaacaataaaacgtatactaactaaaaacgtatataaaataagcacacgacaartttaggccaaaacgtaaaccaacaaaaaaaagtgtttatgtccaaatataaccaacttgaatttataacaatagataaaa

SEQ ID NO: 2084 - DNA, 161 bp, Parthenium argentatum
aatataaccaacttgaatttataacaatagataaaaaaaataaatacgtaggtgtcaaaataaaaatttttaaaagtgtayaaaagttgagggggtgatgttgaaaagaaaaaagaaacgtattgttccattagaatgaaccgaattaaaattgaggaggt

SEQ ID NO: 2085 - DNA, 161 bp, Parthenium argentatum
gtctgaatggttatctcttaaccattcagacttaaggttgcctcttaaccaataagaggctatgaaccattaagaggtagmctattaatgaccattcagaggctaccaaacagcccctattcgttgcatagttgcgaaaagtatgtccaacgagccccaag

SEQ ID NO: 2086 - DNA, 161 bp, Parthenium argentatum
tttttctgcataaaattttcgatgcagcacctattgagtaaatacttgatattatttgtattgacgaagtattgtacacgsacttcactattttcaaaaggttgtattaaaaagtaattgtcgtatcaggacaatgtctgtcatacagggtagttcttgat

SEQ ID NO: 2087 - DNA, 161 bp, Parthenium argentatum
aattaacacgttacacaattaactataattcacacaaaatgtcatgagatacatgcatgattagttttcaaaaggataatrcattgctagcctaagttacctgtctctttctcctctcaccgattgaaagtcaacagcaacagaagtatagtaacgctaaa

SEQ ID NO: 2088 - DNA, 161 bp, Parthenium argentatum
gaacctttaccagatattgagccattttactgaaccgaaacaaaaactttgaccggtggctcctcaatgacataattaggktatcaaactacttttgaactgtcattgatgccatcattcccgtcatcaagcataacgatgacatcaccatcgttttcagg

SEQ ID NO: 2089 - DNA, 161 bp, Parthenium argentatum
aacacacatacacaaagcactaaaattgttaaacaaaacacatagtaaaatcaccaaagtgatgatgaaatttttttaatyagacagcaggtgaagctaagctttagaactgtgatttgtcaagactatcaaaataaggatgatccatagcagctttggct

SEQ ID NO: 2090 - DNA, 161 bp, Parthenium argentatum
aagctataaaaattgtccaaattgtccttaactccttatgtgacataattacactgtatgtccctgcttttactgttcctwtatggtttgggtccctagtcatctgagtaaaatgactaatccataacagaacaggaaaagaaaggacatgcagtgtaatt

SEQ ID NO: 2091 - DNA, 161 bp, Parthenium argentatum
ccctgcttttactgttcctttatggtttgggtccctagtcatctgagtaaaatgactaatccataacagaacaggaaaagmaaggacatgcagtgtaattatgtcacatcaggaatttcataatattttacaaacccagggaaacaaaagtgtgtttaatg

SEQ ID NO: 2092 - DNA, 161 bp, Parthenium argentatum
aacgtttttatgactatttttctttttttgatcgttttttttttgtttttatacaagatttttcggcgttggtgatcagckgccgtagtgtgacattggtctcatagattttccgttaaaggattatcttgattttggctagagctccattattgtaaagg

SEQ ID NO: 2093 - DNA, 161 bp, Parthenium argentatum
gaaaattccattatagctaacaaaattcatccaacttttagtcaaaacgtctatgatccgttcttcacggccaattaattyaagtaactagtgtattcacaacaaaagttcatacttaataataaacgaatattaagaaattcgagcaaaagatggtcaaa

SEQ ID NO: 2094 - DNA, 161 bp, Parthenium argentatum
gagcactttatagggacttattggggtgcggtcgggacatcattttgttccgaaattgttgagtctgccgacgcttatctytttgctgggcccatattcaacgactatagttcggtcggctactcattgttgctcaagaaagaaaaagccatcattgtgca

SEQ ID NO: 2095 - DNA, 161 bp, Parthenium argentatum
gaaataagaggtatgagaatcagcaaaacaacaacggctaaatcctgacaaaagaattaataaataataaacgtgttaaaygcaatgttttcttggaactttttaaaaatcatattatatccacacaagcacccataaacttatattcatgattggatgta

SEQ ID NO: 2096 - DNA, 161 bp, Parthenium argentatum
tttatttagaaactctggtacgcttgaaccctcataatataaactttcaattttttgtgttacccaaaaatattttgaagytataaagccctcttgatttgatgcagtagtcaaccctttgatcttgcttttcaggttgattgttttcatgtattgcgaaa

SEQ ID NO: 2097 - DNA, 161 bp, Parthenium argentatum
tcattaagcacgtgattggttatcgtaaccagatcattaaatacgtgacgggtattgtaagtagcagagtgccttaaaagytaaaacatctaatatatatttttaaactttgaattctagttatttccctcaccaaaagtgagggcgtattgaaagtagat

SEQ ID NO: 2098 - DNA, 161 bp, Parthenium argentatum
ttgaattctagttatttccctcaccaaaagtgagggcgtattgaaagtagataattaaatatgtgacggggtattgtaacmagcagagtgaccttgaaaataaatagagttacctgcttcaccataagcggcatctgcgggagaaaccttggtgccaacag

SEQ ID NO: 2099 - DNA, 161 bp, Parthenium argentatum
gaccccttgtttgtgcaaactacaacaaaatggacctttagcgatgacaattgtcgccgctattgcctagaattgtcgtcrctaaacatttagcggcgacatatctccgctaaaggccgtcgccgctaaaagtttgtcactaaaggccaagctgtcaccgc

SEQ ID NO: 2100 - DNA, 161 bp, Parthenium argentatum
acaagttcacttattttgttattctcatagtacattcgtacctgtcctactaaaggctggtgattttggttgccatagcayaacctcccacataacacttcaaacaacactacgccaaaagagtagacatctgactctttcgttagtacccctgtctcttg

SEQ ID NO: 2101 - DNA, 161 bp, Parthenium argentatum
ttttcggaatgaaaacaggggattgttattcggatgtcttcttcttcgtgaacggtggaatgattgggaaccaatgctctratgccaattgtgagatcacaggatcgatgagggtaaaggatttgagagagaattcttataaaacaaagattcaatacatt

SEQ ID NO: 2102 - DNA, 161 bp, Parthenium argentatum
aaagattcaatacatttacaaatgatacaatatgtttggtatttatacaagtgaaaggttgtgtctcttggacataaccgycgtgatggttggttgtataaccgccactaactaaccaactaatatatacttaggataagtatctaacttaggataaaagg

SEQ ID NO: 2103 - DNA, 161 bp, Parthenium argentatum
gacagattgctcacctccatatcaatcctaggataagtataagaaaagacaatctcctcaatgcacctacgaagtccatgygtctgacaagtggaaggaaaacaattcaaaggattacatagatgcatataggagtgaatcaaattcattgacatttatca

SEQ ID NO: 2104 - DNA, 161 bp, Parthenium argentatum
gccataaccggttagagtttcaaaataaccaatggtttgtagccggttagtgtattttgggggaggaaccggttatttttwaccgatgtatcggttaaccgggaaaaaaaccaaacaattgaagaaaaaaaaaaactgaaaataacacgttaattaaccga

SEQ ID NO: 2105 - DNA, 161 bp, Parthenium argentatum
acattcagattattatcgtaatgatattacgttttgtaatcataaataatgcatcaactatttaagcaaaaacaatattamaacagagaagaaagggattgcatgtcaaaccaaaacctgccttatttggactcgtcctacaatatttgacatttcaagac

SEQ ID NO: 2106 - DNA, 161 bp, Parthenium argentatum
acatgctgaacaactaacgcgacattcgctttaatgtattaacctttcgttttaaaatgtataaaattattatactattgytcactgaagttgtatggacgaaaggtgactcaatttctaaaagaatttgggagcattgaatcagggcaactcatagctta

SEQ ID NO: 2107 - DNA, 161 bp, Parthenium argentatum
catgggaaatgggttctaacataaaacaagcattgggctacgagtggggttatgaggtccatatggagcgggcggaagggwctcaacctgtcggatcatgtggaaaacaaccattgcatgttttgctaattagctacgagacccgaattccatctattagg

SEQ ID NO: 2108 - DNA, 161 bp, Parthenium argentatum
gcgacccagtctgctaacaagtaagcacaccatatgaatattctgatccttcttttggcgatatactttcttcggtgaccrctgtagattagtgaagtttgtagagtgaggctgagaagaaccaatgctctaagctcccatttgttccattgtttcctcaa

SEQ ID NO: 2109 - DNA, 161 bp, Parthenium argentatum
aataaaatggtgtgtattggttgctgtaggttattagtatgtttgggaactattgtattgctgctaactgctattcatagmttgttgataggcagttataaactgaaataaaacttagaattatattcctgactgagtgtgttataggatgcttgtcctac

SEQ ID NO: 2110 - DNA, 161 bp, Parthenium argentatum
gcttttgaaaggtccatctttactaaaacacagaagactaatgcaaggactgaaggtattattataattgacttttatctytcacacttactgctaaggtatatatcgaataccttattatgaagatagttgtgcctgcagctggaatgctttcaaagata

SEQ ID NO: 2111 - DNA, 161 bp, Parthenium argentatum
tcacccagaagtacgtgccctcgggtttcttcccaaagagggccatggtgtatatgtcgcaaggtatggctttgacccgtkttttgcaagatggcagtctagacttgcacagccagcatcattatcaggcatggtatgggttgatgtgttgaaggctaaag

SEQ ID NO: 2112 - DNA, 161 bp, Parthenium argentatum
aaggatgaaatcattcaaatcatgacactgacaaagatctaataataatttatatcatgtttgactttcaagagtcaaaaktattggtttctatcctcaaaatcaacaagatttatagaaaaaatttcaaaacctttacaacatttaacaaaacaaaatca

SEQ ID NO: 2113 - DNA, 161 bp, Parthenium argentatum
catgtttgactttcaagagtcaaaagtattggtttctatcctcaaaatcaacaagatttatagaaaaaatttcaaaacctytacaacatttaacaaaacaaaatcatttacttgatctcaaaatccaaaaacaataacttcaaaatattatatgaagactc

SEQ ID NO: 2114 - DNA, 161 bp, Parthenium argentatum
cttgcagcatagctcttggttaaacctatttacattcagatactaaaccaatggatttgccttcaacatggctctcacaasaagtaagtaaagcatatattatgcacaaactaaatcatatatacatatatgtatttcttgaatactgtacttacaagtta

SEQ ID NO: 2115 - DNA, 161 bp, Parthenium argentatum
tcaggtgaattgttcaacccgaacacgatccataattccctatttttattcgtgtcaaaaacatcaaccctaagccgcacrgacttagaattgtataacctgaaacaatttggtgagttgtaatcaagttgtaaatgtgttaatgaagttgtgggttgaaa

SEQ ID NO: 2116 - DNA, 161 bp, Parthenium argentatum
cctgaaacaatttggtgagttgtaatcaagttgtaaatgtgttaatgaagttgtgggttgaaaatgggttaagcatgttarcgggttgacctgtttaactaaacaggttggtgggtcgacctattttgttaaacgggctatatatgtcaaccctaacacga

SEQ ID NO: 2117 - DNA, 161 bp, Parthenium argentatum
ttaaatgagtttcattaattaatagattttgtaacggtcaaattgataaatttcaaatggttattcttgtgattttccttwattatatgtatgcatcttttatgtatatttgcagactcaagtatgtatgtatacatgtaccgtactttacacatgaacac

SEQ ID NO: 2118 - DNA, 161 bp, Parthenium argentatum
gtgattttccttaattatatgtatgcatcttttatgtatatttgcagactcaagtatgtatgtatacatgtaccgtacttyacacatgaacacaaactagacataagaatatggtaatactataatgtatggaatctcttataataattagaattttttgt

SEQ ID NO: 2119 - DNA, 161 bp, Parthenium argentatum
acaagatctcttaaaagtacatcatcctcaactatatgaatatagtcggcagcaggaagaagagatggtgatgatttactraacattaaagatgctaattgttgggttcagattgatgttgttatcataagacaacaataaatttaaattattgggtattc

SEQ ID NO: 2120 - DNA, 161 bp, Parthenium argentatum
ttcagattcctagaaggaagaaagtgcacatgcttaggtttcaacagcaatttctataaataagcaattccaacaggaaayagagattaatatgtcgtatactaagagatgagaggctgacttaaatagccatgcataagaaaaaacacaattctaacgac

SEQ ID NO: 2121 - DNA, 161 bp, Parthenium argentatum
acttgtctcttcaagccagtaatgataatattgacttatgttggtatttatccaagcttcatgatcaaatatgttctcccrtaggaccaagcgcgttcgtttgcattgacatttttttttatatattaatggatgagaaatgttcaagtagcttttgaacc

SEQ ID NO: 2122 - DNA, 161 bp, Parthenium argentatum
tttgcattgacatttttttttatatattaatggatgagaaatgttcaagtagcttttgaaccattttgacattacaagttyatcccctcctttagaattttcttctgctccatttactttatcattcatattaatggtacataaaggggaaagatccgttt

SEQ ID NO: 2123 - DNA, 161 bp, Parthenium argentatum
agatgctattcttgaacctgagggccctaaggtactctatcaatttggtatgttttgatcttattatggttgatttgtaaytaaatgattaatgatattatatgcagaaaatggaaattgtgaaacatgacttccaagttgtttttttttttttttttttt

SEQ ID NO: 2124 - DNA, 161 bp, Parthenium argentatum
cattcgctaaaatcacacaaatccacatttcaattcacatcattaagcacgtgattggttatcgtaaccagatcattaaayacgtgacgggtattgtaagtagcagagtgccttaaaagttaaaacatctaatatatatttttaaactttgagttctagtt

SEQ ID NO: 2125 - DNA, 161 bp, Parthenium argentatum
acaaaataagtgttatgtcttttgaacgcagattacaagagcggaactgttgatacttggacaagagatggttctccaaaktttgaagatggggttcgccctaatgctgacaagtggcagggggacccacagcaatacttcaactccaatgttccccctca

SEQ ID NO: 2126 - DNA, 161 bp, Parthenium argentatum
tcatgagaatacattggatcttggacagcgcatcaccaggtatgctcatgtgcttgaccaattgggctatcgcatgtctgytagatcaatatacggagatagtagtttattatacaaacctcaatagaatcatttttttattctcttctcggggaagaggg

SEQ ID NO: 2127 - DNA, 161 bp, Parthenium argentatum
cctcaatagaatcatttttttattctcttctcggggaagaggggacatctacacatagtaataaataataatcatatttawaagttaaaagacctcatactttactgtctttctgaaaattttctggagtgttaaattgattatactcttttaactcgcaa

SEQ ID NO: 2128 - DNA, 161 bp, Parthenium argentatum
aataataatcatatttaaaagttaaaagacctcatactttactgtctttctgaaaattttctggagtgttaaattgattayactcttttaactcgcaagatatttgttacagcatagcagttaaagtgagcttattattcaactgtttagttgaactagag

SEQ ID NO: 2129 - DNA, 161 bp, Parthenium argentatum
gcaacaaaatcttcattatcaatatttgttcggctaatgcaggatccaattgggaaactgttgtgtatttgtttgattttsaccgttgctccatgcatgcttctcgagtcagaggttgagaatttcagagtaatgtcccgcttacgaatctgcaagttaga

SEQ ID NO: 2130 - DNA, 161 bp, Parthenium argentatum
aaatttttaagcttcaagtatataggagttgcaagatacaatgtattattgaatgcgtcggtttatttaaaaaaaaaaaamtcaaaattatgttaaaattgtggacaaaaagtgtttgggtttgcacacaaaactacatgttacccacgtgctttcttttg

SEQ ID NO: 2131 - DNA, 161 bp, Parthenium argentatum
tacagttggtagctaaagtcaggaataaatgtaatgttagtttctattttgtggagcttgcctttctgatatgtggatctmacgatttaaggattctaaaaaatcgaagatgcaagtgttttatatatctgtgaactaatacccatctaaaatgaaccaat

SEQ ID NO: 2132 - DNA, 161 bp, Parthenium argentatum
aaaatcgaagatgcaagtgttttatatatctgtgaactaatacccatctaaaatgaaccaattttttttccatgattcatrtattaaatatgtaaagttgttataccttgtcaggaggaagacttggagaagaaattgattttcatccaactaccaccaac

SEQ ID NO: 2133 - DNA, 161 bp, Parthenium argentatum
aggatttatcttggctccaatcattcgagattggttcatacgaattgaaaagtttgataagaataagaattaggccgctcragcttttatgtttctagcttgacttgaatgattcgagtctgagcttgagcccaaataactttattatatcttgactcatt

SEQ ID NO: 2134 - DNA, 161 bp, Parthenium argentatum
gttagtggagtatatttttttaacgatatccacaatgaccataatacgccgtaaagggttttcttttcttcttaaaatgaratttttctgtaccctcgccaactagagccaaaagaattctttgaagaagaaacctgcattgaccttcatatataaacagg

SEQ ID NO: 2135 - DNA, 161 bp, Parthenium argentatum
tagaatatatagttgtcgtacatagctgttgcatcctatgtatacggccttttggagaatcttatgaaattgtcatttgawaaaaacatcaaaacagttgctaactgatcctcacacaagacattgactagtcaaatgaaacatttttcttgttttggaga

SEQ ID NO: 2136 - DNA, 161 bp, Parthenium argentatum
gaggaccgactcctgtgaatagtccctttattcctccatccctgttccatgatcaatgatcataacaatgcatcttgtcawatttgtaatcaaataattgaaaaaaaaactgatgtcgataaagtggacaaatgataaataccgccatatctcaacaagtg

SEQ ID NO: 2137 - DNA, 161 bp, Parthenium argentatum
gtatgtatgtatatggcgtgccaacaataaccagcctacactctaatttggtaatttctacctttgatccaccacaccagmaacatgaccatctaataactggcaaaaagattaagcctactggaattataatgaacaccaagaattcatcgtttgctgaa

SEQ ID NO: 2138 - DNA, 161 bp, Parthenium argentatum
ctggcaaaaagattaagcctactggaattataatgaacaccaagaattcatcgtttgctgaaactaaaaataccgaatacwtccaacaaagtcgcattttttgaagcttagttaacactcaacagcatcaagcataacaaaaggctccaacaaagtaacaa

SEQ ID NO: 2139 - DNA, 20 bp, Artificial Sequence
  Description of Artificial Sequence: Synthetic primer
acacaacgacccagaaaacc

SEQ ID NO: 2140 - DNA, 20 bp, Artificial Sequence
  Description of Artificial Sequence: Synthetic primer
ccatccttccttccttcttc

SEQ ID NO: 2141 - DNA, 20 bp, Artificial Sequence
  Description of Artificial Sequence: Synthetic primer
aaggagaggagaagaatggg

SEQ ID NO: 2142 - DNA, 20 bp, Artificial Sequence
  Description of Artificial Sequence: Synthetic primer
accaccttccccttaacaac

SEQ ID NO: 2143 - DNA, 20 bp, Artificial Sequence
  Description of Artificial Sequence: Synthetic primer
ttaaccacttaaccctcccc

SEQ ID NO: 2144 - DNA, 20 bp, Artificial Sequence
  Description of Artificial Sequence: Synthetic primer
tgtcggcctctatctctctg

SEQ ID NO: 2145 - DNA, 20 bp, Artificial Sequence
  Description of Artificial Sequence: Synthetic primer
ccaacaagtcctcaaacacg

SEQ ID NO: 2146 - DNA, 20 bp, Artificial Sequence
  Description of Artificial Sequence: Synthetic primer
ataactggactcaccaaccg

SEQ ID NO: 2147 - DNA, 20 bp, Artificial Sequence
  Description of Artificial Sequence: Synthetic primer
cagtgtagccatccttcacc

SEQ ID NO: 2148 - DNA, 19 bp, Artificial Sequence
  Description of Artificial Sequence: Synthetic primer
ctctctccacatcaatggc

SEQ ID NO: 2149 - DNA, 20 bp, Artificial Sequence
  Description of Artificial Sequence: Synthetic primer
ctaaatggtcctcctgctca

SEQ ID NO: 2150 - DNA, 20 bp, Artificial Sequence
  Description of Artificial Sequence: Synthetic primer
ccatcaatatccaccgtacc

SEQ ID NO: 2151 - DNA, 20 bp, Artificial Sequence
  Description of Artificial Sequence: Synthetic primer
gtcaagtggagctgtggagt

SEQ ID NO: 2152 - DNA, 20 bp, Artificial Sequence
  Description of Artificial Sequence: Synthetic primer
ctcaatcactcactccacca

SEQ ID NO: 2153 - DNA, 20 bp, Artificial Sequence
  Description of Artificial Sequence: Synthetic primer
ctccgcccataaaacaagac

SEQ ID NO: 2154 - DNA, 20 bp, Artificial Sequence
  Description of Artificial Sequence: Synthetic primer
cccaccacctccattacata

SEQ ID NO: 2155 - DNA, 20 bp, Artificial Sequence
  Description of Artificial Sequence: Synthetic primer
gatactcctgggctgtttga

SEQ ID NO: 2156 - DNA, 20 bp, Artificial Sequence
  Description of Artificial Sequence: Synthetic primer
acaccttttcccgtccttag

SEQ ID NO: 2157 - DNA, 20 bp, Artificial Sequence
  Description of Artificial Sequence: Synthetic primer
ccctttcttcttcatccctc

SEQ ID NO: 2158 - DNA, 20 bp, Artificial Sequence
  Description of Artificial Sequence: Synthetic primer
ctccatcttccaaacccact

SEQ ID NO: 2159 - DNA, 20 bp, Artificial Sequence
  Description of Artificial Sequence: Synthetic primer
tcagggctaacttcctctca

SEQ ID NO: 2160 - DNA, 20 bp, Artificial Sequence
  Description of Artificial Sequence: Synthetic primer
gttatggacgccgttacttg

SEQ ID NO: 2161 - DNA, 20 bp, Artificial Sequence
  Description of Artificial Sequence: Synthetic primer
ccttaactccacagttcccc

SEQ ID NO: 2162 - DNA, 20 bp, Artificial Sequence
  Description of Artificial Sequence: Synthetic primer
tactttcaagtctcaccgcc

SEQ ID NO: 2163 - DNA, 20 bp, Artificial Sequence
  Description of Artificial Sequence: Synthetic primer
gtggttgtaatcaaggacgg

SEQ ID NO: 2164 - DNA, 20 bp, Artificial Sequence
  Description of Artificial Sequence: Synthetic primer
cttctctctccacatcccaa

SEQ ID NO: 2165 - DNA, 20 bp, Artificial Sequence
  Description of Artificial Sequence: Synthetic primer
tgagtttcgtggctctaagg

SEQ ID NO: 2166 - DNA, 20 bp, Artificial Sequence
  Description of Artificial Sequence: Synthetic primer
ctggctgaaacaggtgaagt

SEQ ID NO: 2167 - DNA, 20 bp, Artificial Sequence
  Description of Artificial Sequence: Synthetic primer
atggagggaccttaaaaccc

SEQ ID NO: 2168 - DNA, 20 bp, Artificial Sequence
  Description of Artificial Sequence: Synthetic primer
cctctgcctactcgtcaaaa

SEQ ID NO: 2169 - DNA, 20 bp, Artificial Sequence
  Description of Artificial Sequence: Synthetic primer
cgagttccttcaagtcctca

SEQ ID NO: 2170 - DNA, 20 bp, Artificial Sequence
  Description of Artificial Sequence: Synthetic primer
tctgtaaggcggtttctgtc

SEQ ID NO: 2171 - DNA, 19 bp, Artificial Sequence
  Description of Artificial Sequence: Synthetic primer
gatcctattgctcgttgcc

SEQ ID NO: 2172 - DNA, 20 bp, Artificial Sequence
  Description of Artificial Sequence: Synthetic primer
ctcctatcaaaggacggaga

SEQ ID NO: 2173 - DNA, 20 bp, Artificial Sequence
  Description of Artificial Sequence: Synthetic primer
actgagccaccactaaccag

SEQ ID NO: 2174 - DNA, 20 bp, Artificial Sequence
  Description of Artificial Sequence: Synthetic primer
attcaaaggccagggtagag

SEQ ID NO: 2175 - DNA, 20 bp, Artificial Sequence
  Description of Artificial Sequence: Synthetic primer
gctgaggaagagcatggata

SEQ ID NO: 2176 - DNA, 20 bp, Artificial Sequence
  Description of Artificial Sequence: Synthetic primer
cagtgtagccatccttcacc

SEQ ID NO: 2177 - DNA, 20 bp, Artificial Sequence
  Description of Artificial Sequence: Synthetic primer
gaatgggagtgtgaatggag

SEQ ID NO: 2178 - DNA, 20 bp, Artificial Sequence
  Description of Artificial Sequence: Synthetic primer
caattctctctcctccccat

SEQ ID NO: 2179 - DNA, 20 bp, Artificial Sequence
  Description of Artificial Sequence: Synthetic primer
acaataaggaagagggccac

SEQ ID NO: 2180 - DNA, 20 bp, Artificial Sequence
  Description of Artificial Sequence: Synthetic primer
ccgtctcattgacctacctt

SEQ ID NO: 2181 - DNA, 20 bp, Artificial Sequence
  Description of Artificial Sequence: Synthetic primer
cctccctccttcttctggta

SEQ ID NO: 2182 - DNA, 20 bp, Artificial Sequence
  Description of Artificial Sequence: Synthetic primer
cagacgtcattgctgaagtg

SEQ ID NO: 2183 - DNA, 20 bp, Artificial Sequence
  Description of Artificial Sequence: Synthetic primer
aaatatctccccaacccctc

SEQ ID NO: 2184 - DNA, 20 bp, Artificial Sequence
  Description of Artificial Sequence: Synthetic primer
acgaagcagtttaccaccac

SEQ ID NO: 2185 - DNA, 20 bp, Artificial Sequence
  Description of Artificial Sequence: Synthetic primer
ccatggttaggactcaggtc

SEQ ID NO: 2186 - DNA, 20 bp, Artificial Sequence
  Description of Artificial Sequence: Synthetic primer
cgtatcactttcaacccgac

SEQ ID NO: 2187 - DNA, 20 bp, Artificial Sequence
  Description of Artificial Sequence: Synthetic primer
atcctgttcttgacgagctg

SEQ ID NO: 2188 - DNA, 20 bp, Artificial Sequence
  Description of Artificial Sequence: Synthetic primer
ccatcgatcatcagttaggg

SEQ ID NO: 2189 - DNA, 20 bp, Artificial Sequence
  Description of Artificial Sequence: Synthetic primer
gcctgaaatcaagtgtgtcc

SEQ ID NO: 2190 - DNA, 20 bp, Artificial Sequence
  Description of Artificial Sequence: Synthetic primer
ctcaagccctacatcttccc

SEQ ID NO: 2191 - DNA, 20 bp, Artificial Sequence
  Description of Artificial Sequence: Synthetic primer
ggtggagaccctgagaagtt

SEQ ID NO: 2192 - DNA, 20 bp, Artificial Sequence
  Description of Artificial Sequence: Synthetic primer
caacactcaacacctcgtga

SEQ ID NO: 2193 - DNA, 20 bp, Artificial Sequence
  Description of Artificial Sequence: Synthetic primer
gtattgttcaagtgtggggg

SEQ ID NO: 2194 - DNA, 18 bp, Artificial Sequence
  Description of Artificial Sequence: Synthetic primer
gcaacaacaatggcaacc

SEQ ID NO: 2195 - DNA, 20 bp, Artificial Sequence
  Description of Artificial Sequence: Synthetic primer
ttacccactgacgtcatcct

SEQ ID NO: 2196 - DNA, 20 bp, Artificial Sequence
  Description of Artificial Sequence: Synthetic primer
gtttcttcaagcgtctgctg

SEQ ID NO: 2197 - DNA, 20 bp, Artificial Sequence
  Description of Artificial Sequence: Synthetic primer
acgcttcttcagtgcttctg

SEQ ID NO: 2198 - DNA, 20 bp, Artificial Sequence
  Description of Artificial Sequence: Synthetic primer
aaccgtctaaaacccgactc

SEQ ID NO: 2199 - DNA, 20 bp, Artificial Sequence
  Description of Artificial Sequence: Synthetic primer
ctcacttgtatcattgcccc

SEQ ID NO: 2200 - DNA, 20 bp, Artificial Sequence
  Description of Artificial Sequence: Synthetic primer
gcaggccgtatcacaaatac

SEQ ID NO: 2201 - DNA, 20 bp, Artificial Sequence
  Description of Artificial Sequence: Synthetic primer
aaaccctagacaccgaaacc

SEQ ID NO: 2202 - DNA, 20 bp, Artificial Sequence
  Description of Artificial Sequence: Synthetic primer
gttgtagggttttggtgacg

SEQ ID NO: 2203 - DNA, 20 bp, Artificial Sequence
  Description of Artificial Sequence: Synthetic primer
acacccctctctctcttgct

SEQ ID NO: 2204 - DNA, 20 bp, Artificial Sequence
  Description of Artificial Sequence: Synthetic primer
acaacactgtgtaatggccc

SEQ ID NO: 2205 - DNA, 20 bp, Artificial Sequence
  Description of Artificial Sequence: Synthetic primer
tctcatctcaatgctcctcc

SEQ ID NO: 2206 - DNA, 20 bp, Artificial Sequence
  Description of Artificial Sequence: Synthetic primer
aacaatacctcgcactctgc

SEQ ID NO: 2207 - DNA, 20 bp, Artificial Sequence
  Description of Artificial Sequence: Synthetic primer
atcttgcctctctaaagccc

SEQ ID NO: 2208 - DNA, 20 bp, Artificial Sequence
  Description of Artificial Sequence: Synthetic primer
taccctcctcagaccctacc

SEQ ID NO: 2209 - DNA, 20 bp, Artificial Sequence
  Description of Artificial Sequence: Synthetic primer
ctcaagcgtatgagttggct

SEQ ID NO: 2210 - DNA, 20 bp, Artificial Sequence
  Description of Artificial Sequence: Synthetic primer
ctgtttcaccgattctgacc

SEQ ID NO: 2211 - DNA, 18 bp, Artificial Sequence
  Description of Artificial Sequence: Synthetic primer
gaccaacacccccttttc

SEQ ID NO: 2212 - DNA, 20 bp, Artificial Sequence
  Description of Artificial Sequence: Synthetic primer
aacagctggagacccaagta

SEQ ID NO: 2213 - DNA, 20 bp, Artificial Sequence
  Description of Artificial Sequence: Synthetic primer
accctagatcctcggttcac

SEQ ID NO: 2214 - DNA, 20 bp, Artificial Sequence
  Description of Artificial Sequence: Synthetic primer
gacgatgagttcagaaacgg

SEQ ID NO: 2215 - DNA, 20 bp, Artificial Sequence
  Description of Artificial Sequence: Synthetic primer
atcctcccaagaagatgacc

SEQ ID NO: 2216 - DNA, 20 bp, Artificial Sequence
  Description of Artificial Sequence: Synthetic primer
aagaagaggagcctgggtta

SEQ ID NO: 2217 - DNA, 18 bp, Artificial Sequence
  Description of Artificial Sequence: Synthetic primer
tggcgaaagaagaagagg

SEQ ID NO: 2218 - DNA, 20 bp, Artificial Sequence
  Description of Artificial Sequence: Synthetic primer
catgctaccccttatagcca

SEQ ID NO: 2219 - DNA, 20 bp, Artificial Sequence
  Description of Artificial Sequence: Synthetic primer
tggagtctcctgcttcaaac

SEQ ID NO: 2220 - DNA, 20 bp, Artificial Sequence
  Description of Artificial Sequence: Synthetic primer
ctactggtggagaaggatgc

SEQ ID NO: 2221 - DNA, 20 bp, Artificial Sequence
  Description of Artificial Sequence: Synthetic primer
gtcatctcaaccaccaccat

SEQ ID NO: 2222 - DNA, 20 bp, Artificial Sequence
  Description of Artificial Sequence: Synthetic primer
acaaaccctaactggaccgt

SEQ ID NO: 2223 - DNA, 22 bp, Artificial Sequence
  Description of Artificial Sequence: Synthetic primer
tctctctcctcacctacgtcat

SEQ ID NO: 2224 - DNA, 20 bp, Artificial Sequence
  Description of Artificial Sequence: Synthetic primer
tcagggtaaggaggaaggac

SEQ ID NO: 2225 - DNA, 20 bp, Artificial Sequence
  Description of Artificial Sequence: Synthetic primer
agattctcgagtgtgcttgg

SEQ ID NO: 2226 - DNA, 18 bp, Artificial Sequence
  Description of Artificial Sequence: Synthetic primer
ctgcctgcgttttctcat

SEQ ID NO: 2227 - DNA, 18 bp, Artificial Sequence
  Description of Artificial Sequence: Synthetic primer
gaaagcggatcacacagc

SEQ ID NO: 2228 - DNA, 20 bp, Artificial Sequence
  Description of Artificial Sequence: Synthetic primer
ttcaaccttaggtccagacg

SEQ ID NO: 2229 - DNA, 20 bp, Artificial Sequence
  Description of Artificial Sequence: Synthetic primer
gtcaccacttcctccaaatg

SEQ ID NO: 2230 - DNA, 20 bp, Artificial Sequence
  Description of Artificial Sequence: Synthetic primer
ttacggacggagacaagaag

SEQ ID NO: 2231 - DNA, 19 bp, Artificial Sequence
  Description of Artificial Sequence: Synthetic primer
ccaaatcaacaccaccacc

SEQ ID NO: 2232 - DNA, 20 bp, Artificial Sequence
  Description of Artificial Sequence: Synthetic primer
ctcattcacctcccacctaa

SEQ ID NO: 2233 - DNA, 20 bp, Artificial Sequence
  Description of Artificial Sequence: Synthetic primer
acgaagatgcactcctgaag

SEQ ID NO: 2234 - DNA, 20 bp, Artificial Sequence
  Description of Artificial Sequence: Synthetic primer
cctgttgcttctagggtgaa

SEQ ID NO: 2235 - DNA, 20 bp, Artificial Sequence
  Description of Artificial Sequence: Synthetic primer
ccacctccatcttaacccat

SEQ ID NO: 2236 - DNA, 20 bp, Artificial Sequence
  Description of Artificial Sequence: Synthetic primer
tttgtaaccctcacacaccc

SEQ ID NO: 2237 - DNA, 21 bp, Artificial Sequence
  Description of Artificial Sequence: Synthetic primer
ctcactctctctccagaagca

SEQ ID NO: 2238 - DNA, 20 bp, Artificial Sequence
  Description of Artificial Sequence: Synthetic primer
cccatgtaccgatcaaagag

SEQ ID NO: 2239 - DNA, 20 bp, Artificial Sequence
  Description of Artificial Sequence: Synthetic primer
gacggaaataaaccgtcgtc

SEQ ID NO: 2240 - DNA, 20 bp, Artificial Sequence
  Description of Artificial Sequence: Synthetic primer
cacgttcctcctaccgtaaa

SEQ ID NO: 2241 - DNA, 20 bp, Artificial Sequence
  Description of Artificial Sequence: Synthetic primer
gaacgttgacaaggtggaac

SEQ ID NO: 2242 - DNA, 20 bp, Artificial Sequence
  Description of Artificial Sequence: Synthetic primer
acggtatcgtcctttccttc

SEQ ID NO: 2243 - DNA, 20 bp, Artificial Sequence
  Description of Artificial Sequence: Synthetic primer
tagtaccactccacaagccc

SEQ ID NO: 2244 - DNA, 20 bp, Artificial Sequence
  Description of Artificial Sequence: Synthetic primer
gacactctctctcatcccca

SEQ ID NO: 2245 - DNA, 20 bp, Artificial Sequence
  Description of Artificial Sequence: Synthetic primer
gacccatacacaggcgttag

SEQ ID NO: 2246 - DNA, 20 bp, Artificial Sequence
  Description of Artificial Sequence: Synthetic primer
ctccctcactcttcgaaaca

SEQ ID NO: 2247 - DNA, 18 bp, Artificial Sequence
  Description of Artificial Sequence: Synthetic primer
agcaaattggggctgtgt

SEQ ID NO: 2248 - DNA, 19 bp, Artificial Sequence
  Description of Artificial Sequence: Synthetic primer
gttgctgtcgaaaagctcc

SEQ ID NO: 2249 - DNA, 20 bp, Artificial Sequence
  Description of Artificial Sequence: Synthetic primer
ctctcactcctctcagcagc

SEQ ID NO: 2250 - DNA, 20 bp, Artificial Sequence
  Description of Artificial Sequence: Synthetic primer
cccctttcatctctctagcc

SEQ ID NO: 2251 - DNA, 20 bp, Artificial Sequence
  Description of Artificial Sequence: Synthetic primer
ggcccagaatcaaggaagta

SEQ ID NO: 2252 - DNA, 18 bp, Artificial Sequence
  Description of Artificial Sequence: Synthetic primer
ccccaatcaaagccctaa

SEQ ID NO: 2253 - DNA, 20 bp, Artificial Sequence
  Description of Artificial Sequence: Synthetic primer
gtgaaagggatgtgttggag

SEQ ID NO: 2254 - DNA, 20 bp, Artificial Sequence
  Description of Artificial Sequence: Synthetic primer
caaggaagtggttgaaggag

SEQ ID NO: 2255 - DNA, 20 bp, Artificial Sequence
  Description of Artificial Sequence: Synthetic primer
aataagacccacacccaacc

SEQ ID NO: 2256 - DNA, 20 bp, Artificial Sequence
  Description of Artificial Sequence: Synthetic primer
ggtaggtcgcctaagagagg

SEQ ID NO: 2257 - DNA, 20 bp, Artificial Sequence
  Description of Artificial Sequence: Synthetic primer
gtaaccacatggacgatgct

SEQ ID NO: 2258 - DNA, 20 bp, Artificial Sequence
  Description of Artificial Sequence: Synthetic primer
ccctacactccaccacactc

SEQ ID NO: 2259 - DNA, 20 bp, Artificial Sequence
  Description of Artificial Sequence: Synthetic primer
gggaaggaaagaaagtgagg

SEQ ID NO: 2260 - DNA, 20 bp, Artificial Sequence
  Description of Artificial Sequence: Synthetic primer
tactcaggtgatggtgggtt

SEQ ID NO: 2261 - DNA, 20 bp, Artificial Sequence
  Description of Artificial Sequence: Synthetic primer
accctaggggacgattgtag

SEQ ID NO: 2262 - DNA, 19 bp, Artificial Sequence
  Description of Artificial Sequence: Synthetic primer
gtcatctccaaccaccgta

SEQ ID NO: 2263 - DNA, 20 bp, Artificial Sequence
  Description of Artificial Sequence: Synthetic primer
tgctcctacagagccaaaag

SEQ ID NO: 2264 - DNA, 20 bp, Artificial Sequence
  Description of Artificial Sequence: Synthetic primer
ccctaccacctgttgtcaag

SEQ ID NO: 2265 - DNA, 20 bp, Artificial Sequence
  Description of Artificial Sequence: Synthetic primer
tgagtttcgtggctctaagg

SEQ ID NO: 2266 - DNA, 19 bp, Artificial Sequence
  Description of Artificial Sequence: Synthetic primer
caccaagcttttctggtcc

SEQ ID NO: 2267 - DNA, 21 bp, Artificial Sequence
  Description of Artificial Sequence: Synthetic primer
ctattgatgcccctctctctc

SEQ ID NO: 2268 - DNA, 20 bp, Artificial Sequence
  Description of Artificial Sequence: Synthetic primer
gattactcgttcaacggtcg

SEQ ID NO: 2269 - DNA, 20 bp, Artificial Sequence
  Description of Artificial Sequence: Synthetic primer
agagaaatctgcaccactcg

SEQ ID NO: 2270 - DNA, 19 bp, Artificial Sequence
  Description of Artificial Sequence: Synthetic primer
gccgcctccactagataaa

SEQ ID NO: 2271 - DNA, 20 bp, Artificial Sequence
  Description of Artificial Sequence: Synthetic primer
cgtctcctatcatccgattg

SEQ ID NO: 2272 - DNA, 20 bp, Artificial Sequence
  Description of Artificial Sequence: Synthetic primer
ccgagtaacccaacattctg

SEQ ID NO: 2273 - DNA, 20 bp, Artificial Sequence
  Description of Artificial Sequence: Synthetic primer
ccctatgtttccgatcctct

SEQ ID NO: 2274 - DNA, 20 bp, Artificial Sequence
  Description of Artificial Sequence: Synthetic primer
gcaaaacagatctaccaccg

SEQ ID NO: 2275 - DNA, 20 bp, Artificial Sequence
  Description of Artificial Sequence: Synthetic primer
aactccaaactccacctctc

SEQ ID NO: 2276 - DNA, 20 bp, Artificial Sequence
  Description of Artificial Sequence: Synthetic primer
cccctagggtttcattcact

SEQ ID NO: 2277 - DNA, 19 bp, Artificial Sequence
  Description of Artificial Sequence: Synthetic primer
aaagcagcaacactctccc

SEQ ID NO: 2278 - DNA, 20 bp, Artificial Sequence
  Description of Artificial Sequence: Synthetic primer
tggcctcttcttctagggtt

SEQ ID NO: 2279 - DNA, 20 bp, Artificial Sequence
  Description of Artificial Sequence: Synthetic primer
gcaacccatctcacacatac

SEQ ID NO: 2280 - DNA, 20 bp, Artificial Sequence
  Description of Artificial Sequence: Synthetic primer
agctgttggaggagtacacg

SEQ ID NO: 2281 - DNA, 20 bp, Artificial Sequence
  Description of Artificial Sequence: Synthetic primer
ggctatccacaaatgtacgc

SEQ ID NO: 2282 - DNA, 19 bp, Artificial Sequence
  Description of Artificial Sequence: Synthetic primer
caccctcttcatcgcaaac

SEQ ID NO: 2283 - DNA, 20 bp, Artificial Sequence
  Description of Artificial Sequence: Synthetic primer
gactccaccaaccaacactc

SEQ ID NO: 2284 - DNA, 20 bp, Artificial Sequence
  Description of Artificial Sequence: Synthetic primer
ccgctaacaatcacttcacc

SEQ ID NO: 2285 - DNA, 20 bp, Artificial Sequence
  Description of Artificial Sequence: Synthetic primer
cgtcttgcaggatgaagtct

SEQ ID NO: 2286 - DNA, 20 bp, Artificial Sequence
  Description of Artificial Sequence: Synthetic primer
ctcttcttccatctcaccca

SEQ ID NO: 2287 - DNA, 20 bp, Artificial Sequence
  Description of Artificial Sequence: Synthetic primer
ccgagtgagtagacccagaa

SEQ ID NO: 2288 - DNA, 20 bp, Artificial Sequence
  Description of Artificial Sequence: Synthetic primer
gtatgaccgggttgactcag

SEQ ID NO: 2289 - DNA, 20 bp, Artificial Sequence
  Description of Artificial Sequence: Synthetic primer
gggaggattaaaggatctcg

SEQ ID NO: 2290 - DNA, 18 bp, Artificial Sequence
  Description of Artificial Sequence: Synthetic primer
cggaccaaacgaagaaca

SEQ ID NO: 2291 - DNA, 20 bp, Artificial Sequence
  Description of Artificial Sequence: Synthetic primer
caaccccaattatacccctc

SEQ ID NO: 2292 - DNA, 20 bp, Artificial Sequence
  Description of Artificial Sequence: Synthetic primer
actcaggcatctgatcatgg

SEQ ID NO: 2293 - DNA, 20 bp, Artificial Sequence
  Description of Artificial Sequence: Synthetic primer
atacaggtcactggctctcg

SEQ ID NO: 2294 - DNA, 20 bp, Artificial Sequence
  Description of Artificial Sequence: Synthetic primer
acctaaacacaccgagtcca

SEQ ID NO: 2295 - DNA, 20 bp, Artificial Sequence
  Description of Artificial Sequence: Synthetic primer
taagacggagcacaaggaag

SEQ ID NO: 2296 - DNA, 20 bp, Artificial Sequence
  Description of Artificial Sequence: Synthetic primer
ttacttaagccctgtcgtgg

SEQ ID NO: 2297 - DNA, 20 bp, Artificial Sequence
  Description of Artificial Sequence: Synthetic primer
tgctcaccaggttaggtgtt

SEQ ID NO: 2298 - DNA, 20 bp, Artificial Sequence
  Description of Artificial Sequence: Synthetic primer
tgtgtgctctacgaaccaga

SEQ ID NO: 2299 - DNA, 20 bp, Artificial Sequence
  Description of Artificial Sequence: Synthetic primer
gaacatctgcaaaccctagc

SEQ ID NO: 2300 - DNA, 20 bp, Artificial Sequence
  Description of Artificial Sequence: Synthetic primer
gttctggtgttgatgggaga

SEQ ID NO: 2301 - DNA, 20 bp, Artificial Sequence
  Description of Artificial Sequence: Synthetic primer
gatggctatgtctatggcga

SEQ ID NO: 2302 - DNA, 20 bp, Artificial Sequence
  Description of Artificial Sequence: Synthetic primer
ggaatctctgaccaatccct

SEQ ID NO: 2303 - DNA, 20 bp, Artificial Sequence
  Description of Artificial Sequence: Synthetic primer
caacccttgtgacccactac

SEQ ID NO: 2304 - DNA, 20 bp, Artificial Sequence
  Description of Artificial Sequence: Synthetic primer
tacaccttcacccactccat

SEQ ID NO: 2305 - DNA, 20 bp, Artificial Sequence
  Description of Artificial Sequence: Synthetic primer
accaccacatacaccacaca

SEQ ID NO: 2306 - DNA, 20 bp, Artificial Sequence
  Description of Artificial Sequence: Synthetic primer
gttatcccatggaaagaccc

SEQ ID NO: 2307 - DNA, 20 bp, Artificial Sequence
  Description of Artificial Sequence: Synthetic primer
ggaagtcttacgtgtcaccg

SEQ ID NO: 2308 - DNA, 20 bp, Artificial Sequence
  Description of Artificial Sequence: Synthetic primer
ctggatgttgagatccgact

SEQ ID NO: 2309 - DNA, 20 bp, Artificial Sequence
  Description of Artificial Sequence: Synthetic primer
cggagtgaagctacaaggaa

SEQ ID NO: 2310 - DNA, 20 bp, Artificial Sequence
  Description of Artificial Sequence: Synthetic primer
gagttggaggggttcttgtt

SEQ ID NO: 2311 - DNA, 20 bp, Artificial Sequence
  Description of Artificial Sequence: Synthetic primer
cacgttgtaagcacgtcatc

SEQ ID NO: 2312 - DNA, 20 bp, Artificial Sequence
  Description of Artificial Sequence: Synthetic primer
ccttgctccagtgtcttgta

SEQ ID NO: 2313 - DNA, 20 bp, Artificial Sequence
  Description of Artificial Sequence: Synthetic primer
tcgacaacgggctaacttac

SEQ ID NO: 2314 - DNA, 20 bp, Artificial Sequence
  Description of Artificial Sequence: Synthetic primer
cgaaggagaagactccacaa

SEQ ID NO: 2315 - DNA, 20 bp, Artificial Sequence
  Description of Artificial Sequence: Synthetic primer
catcgatcggaactgctaac

SEQ ID NO: 2316 - DNA, 20 bp, Artificial Sequence
  Description of Artificial Sequence: Synthetic primer
tttctatcgagggaaggagg

SEQ ID NO: 2317 - DNA, 20 bp, Artificial Sequence
  Description of Artificial Sequence: Synthetic primer
gggtacagaaaccaaccgat

SEQ ID NO: 2318 - DNA, 20 bp, Artificial Sequence
  Description of Artificial Sequence: Synthetic primer
agaagagcctccacaaacct

SEQ ID NO: 2319 - DNA, 20 bp, Artificial Sequence
  Description of Artificial Sequence: Synthetic primer
actcttcgcctttgatcctc

SEQ ID NO: 2320 - DNA, 20 bp, Artificial Sequence
  Description of Artificial Sequence: Synthetic primer
tgactgtatggagacggagc

SEQ ID NO: 2321 - DNA, 20 bp, Artificial Sequence
  Description of Artificial Sequence: Synthetic primer
tcttcccctccatatcacac

SEQ ID NO: 2322 - DNA, 20 bp, Artificial Sequence
  Description of Artificial Sequence: Synthetic primer
aaaagaggaacgaggagtgg

SEQ ID NO: 2323 - DNA, 20 bp, Artificial Sequence
  Description of Artificial Sequence: Synthetic primer
acacaggatcaacccagcta

SEQ ID NO: 2324 - DNA, 20 bp, Artificial Sequence
  Description of Artificial Sequence: Synthetic primer
agaggctaaagaacccgaag

SEQ ID NO: 2325 - DNA, 20 bp, Artificial Sequence
  Description of Artificial Sequence: Synthetic primer
ggaacctcagggttacgaat

SEQ ID NO: 2326 - DNA, 20 bp, Artificial Sequence
  Description of Artificial Sequence: Synthetic primer
cacccttacaaccagacacc

SEQ ID NO: 2327 - DNA, 20 bp, Artificial Sequence
  Description of Artificial Sequence: Synthetic primer
gcttaccgtcattcactgct

SEQ ID NO: 2328 - DNA, 20 bp, Artificial Sequence
  Description of Artificial Sequence: Synthetic primer
ggtaacaccaccatcaggag

SEQ ID NO: 2329 - DNA, 20 bp, Artificial Sequence
  Description of Artificial Sequence: Synthetic primer
cataacccaagttctggtgg

SEQ ID NO: 2330 - DNA, 20 bp, Artificial Sequence
  Description of Artificial Sequence: Synthetic primer
gcagatggtcagattcatcc

SEQ ID NO: 2331 - DNA, 20 bp, Artificial Sequence
  Description of Artificial Sequence: Synthetic primer
ccgatccttctctctccttc

SEQ ID NO: 2332 - DNA, 20 bp, Artificial Sequence
  Description of Artificial Sequence: Synthetic primer
gaagaaagaggtagaccggg

SEQ ID NO: 2333 - DNA, 19 bp, Artificial Sequence
  Description of Artificial Sequence: Synthetic primer
attcagcgtctgctagcct

SEQ ID NO: 2334 - DNA, 20 bp, Artificial Sequence
  Description of Artificial Sequence: Synthetic primer
ctctaactttggacgacgac

SEQ ID NO: 2335 - DNA, 20 bp, Artificial Sequence
  Description of Artificial Sequence: Synthetic primer
gctaaggaggctcatgttca

SEQ ID NO: 2336 - DNA, 20 bp, Artificial Sequence
  Description of Artificial Sequence: Synthetic primer
tggactgagggcattatagc

SEQ ID NO: 2337 - DNA, 20 bp, Artificial Sequence
  Description of Artificial Sequence: Synthetic primer
gacccatcatcaccagactt

SEQ ID NO: 2338 - DNA, 20 bp, Artificial Sequence
  Description of Artificial Sequence: Synthetic primer
caagatatgcttcggtgagg

SEQ ID NO: 2339 - DNA, 20 bp, Artificial Sequence
  Description of Artificial Sequence: Synthetic primer
gccactagtaggctcaacca

SEQ ID NO: 2340 - DNA, 20 bp, Artificial Sequence
  Description of Artificial Sequence: Synthetic primer
gaccctaaccacttccgaat

SEQ ID NO: 2341 - DNA, 20 bp, Artificial Sequence
  Description of Artificial Sequence: Synthetic primer
caggaagcggagactcataa

SEQ ID NO: 2342 - DNA, 20 bp, Artificial Sequence
  Description of Artificial Sequence: Synthetic primer
atggcatcttcactctcagc

SEQ ID NO: 2343 - DNA, 20 bp, Artificial Sequence
  Description of Artificial Sequence: Synthetic primer
aatcagaagggcagaactcc

SEQ ID NO: 2344 - DNA, 20 bp, Artificial Sequence
  Description of Artificial Sequence: Synthetic primer
gatagcaccgatggagaaga

SEQ ID NO: 2345 - DNA, 20 bp, Artificial Sequence
  Description of Artificial Sequence: Synthetic primer
tgtgaggtttgtgtggagtg

SEQ ID NO: 2346 - DNA, 20 bp, Artificial Sequence
  Description of Artificial Sequence: Synthetic primer
gcaagtgggtctttaccctt

SEQ ID NO: 2347 - DNA, 20 bp, Artificial Sequence
  Description of Artificial Sequence: Synthetic primer
gaagctcaacctgcctatga

SEQ ID NO: 2348 - DNA, 20 bp, Artificial Sequence
  Description of Artificial Sequence: Synthetic primer
gtgtcagatagcggcagaat

SEQ ID NO: 2349 - DNA, 20 bp, Artificial Sequence
  Description of Artificial Sequence: Synthetic primer
aaaggttgggtagatccgtc

SEQ ID NO: 2350 - DNA, 20 bp, Artificial Sequence
  Description of Artificial Sequence: Synthetic primer
cagagctgatgctagccagt

SEQ ID NO: 2351 - DNA, 20 bp, Artificial Sequence
  Description of Artificial Sequence: Synthetic primer
tctgccacacttgactctga

SEQ ID NO: 2352 - DNA, 20 bp, Artificial Sequence
  Description of Artificial Sequence: Synthetic primer
gctccagatggagtcgttta

SEQ ID NO: 2353 - DNA, 20 bp, Artificial Sequence
  Description of Artificial Sequence: Synthetic primer
cgattcagggcagtcttcta

SEQ ID NO: 2354 - DNA, 20 bp, Artificial Sequence
  Description of Artificial Sequence: Synthetic primer
gaaagagacagcggttgaga

SEQ ID NO: 2355 - DNA, 20 bp, Artificial Sequence
  Description of Artificial Sequence: Synthetic primer
gatgttgacgatgacgagtg

SEQ ID NO: 2356 - DNA, 20 bp, Artificial Sequence
  Description of Artificial Sequence: Synthetic primer
cctcttatccctccccataa

SEQ ID NO: 2357 - DNA, 20 bp, Artificial Sequence
  Description of Artificial Sequence: Synthetic primer
gctacaactggtgggtgaac

SEQ ID NO: 2358 - DNA, 20 bp, Artificial Sequence
  Description of Artificial Sequence: Synthetic primer
ctcgcttcgacaatctctgt

SEQ ID NO: 2359 - DNA, 20 bp, Artificial Sequence
  Description of Artificial Sequence: Synthetic primer
aatccggttgactggcttac

SEQ ID NO: 2360 - DNA, 20 bp, Artificial Sequence
  Description of Artificial Sequence: Synthetic primer
caagggatagcgtcacagtt

SEQ ID NO: 2361 - DNA, 20 bp, Artificial Sequence
  Description of Artificial Sequence: Synthetic primer
gagacacaggcacacagatg

SEQ ID NO: 2362 - DNA, 20 bp, Artificial Sequence
  Description of Artificial Sequence: Synthetic primer
gatccaacaccaccactctc

SEQ ID NO: 2363 - DNA, 20 bp, Artificial Sequence
  Description of Artificial Sequence: Synthetic primer
ctcgtcgactcaacggtact

SEQ ID NO: 2364 - DNA, 19 bp, Artificial Sequence
  Description of Artificial Sequence: Synthetic primer
ggctactttcctttgccct

SEQ ID NO: 2365 - DNA, 20 bp, Artificial Sequence
  Description of Artificial Sequence: Synthetic primer
gtcattaacgacacgttccc

SEQ ID NO: 2366 - DNA, 20 bp, Artificial Sequence
  Description of Artificial Sequence: Synthetic primer
agacgacgaacaagacgaag

SEQ ID NO: 2367 - DNA, 20 bp, Artificial Sequence
  Description of Artificial Sequence: Synthetic primer
cgacgagttaacgcttctgt

SEQ ID NO: 2368 - DNA, 20 bp, Artificial Sequence
  Description of Artificial Sequence: Synthetic primer
atagaagcaggcatggtgag

SEQ ID NO: 2369 - DNA, 20 bp, Artificial Sequence
  Description of Artificial Sequence: Synthetic primer
actgcccgatatctcctttc

SEQ ID NO: 2370 - DNA, 20 bp, Artificial Sequence
  Description of Artificial Sequence: Synthetic primer
atccttggacagtagcacca

SEQ ID NO: 2371 - DNA, 20 bp, Artificial Sequence
  Description of Artificial Sequence: Synthetic primer
tagacttagtggcaccagcc

SEQ ID NO: 2372 - DNA, 20 bp, Artificial Sequence
  Description of Artificial Sequence: Synthetic primer
cgactacaaaccggacactc

SEQ ID NO: 2373 - DNA, 18 bp, Artificial Sequence
  Description of Artificial Sequence: Synthetic primer
ctccaccatgtacccgtt

SEQ ID NO: 2374 - DNA, 20 bp, Artificial Sequence
  Description of Artificial Sequence: Synthetic primer
cacagacccagcaaagaact

SEQ ID NO: 2375 - DNA, 20 bp, Artificial Sequence
  Description of Artificial Sequence: Synthetic primer
tactccaagatcaagcctgc

SEQ ID NO: 2376 - DNA, 20 bp, Artificial Sequence
  Description of Artificial Sequence: Synthetic primer
gaggtggtttctggttgttg

SEQ ID NO: 2377 - DNA, 20 bp, Artificial Sequence
  Description of Artificial Sequence: Synthetic primer
ggctgaagtcttgtgctcat

SEQ ID NO: 2378 - DNA, 20 bp, Artificial Sequence
  Description of Artificial Sequence: Synthetic primer
acctggccccacttctatac

SEQ ID NO: 2379 - DNA, 20 bp, Artificial Sequence
  Description of Artificial Sequence: Synthetic primer
cagccttggatcttgtgaac

SEQ ID NO: 2380 - DNA, 20 bp, Artificial Sequence
  Description of Artificial Sequence: Synthetic primer
actggaagtctgcccttttc

SEQ ID NO: 2381 - DNA, 20 bp, Artificial Sequence
  Description of Artificial Sequence: Synthetic primer
tcaggcttagttgttccagg

SEQ ID NO: 2382 - DNA, 20 bp, Artificial Sequence
  Description of Artificial Sequence: Synthetic primer
caccgtatcttcgcacttct

SEQ ID NO: 2383 - DNA, 20 bp, Artificial Sequence
  Description of Artificial Sequence: Synthetic primer
cccaagttcagaccgtagat

SEQ ID NO: 2384 - DNA, 20 bp, Artificial Sequence
  Description of Artificial Sequence: Synthetic primer
tctcgccttctctattggtg

SEQ ID NO: 2385 - DNA, 20 bp, Artificial Sequence
  Description of Artificial Sequence: Synthetic primer
agctcgttacgttggttgtc

SEQ ID NO: 2386 - DNA, 20 bp, Artificial Sequence
  Description of Artificial Sequence: Synthetic primer
gttgctccaccaagtacacc

SEQ ID NO: 2387 - DNA, 20 bp, Artificial Sequence
  Description of Artificial Sequence: Synthetic primer
cataggttccatgggttacg

SEQ ID NO: 2388 - DNA, 20 bp, Artificial Sequence
  Description of Artificial Sequence: Synthetic primer
tcttaggagcacgtccaaac

SEQ ID NO: 2389 - DNA, 20 bp, Artificial Sequence
  Description of Artificial Sequence: Synthetic primer
cataccagaaccttggcatc

SEQ ID NO: 2390 - DNA, 20 bp, Artificial Sequence
  Description of Artificial Sequence: Synthetic primer
tcatactgcatacccgaacc

SEQ ID NO: 2391 - DNA, 20 bp, Artificial Sequence
  Description of Artificial Sequence: Synthetic primer
gggtgacatatttgggttgg

SEQ ID NO: 2392 - DNA, 20 bp, Artificial Sequence
  Description of Artificial Sequence: Synthetic primer
aggtggtccactatgctctg

SEQ ID NO: 2393 - DNA, 20 bp, Artificial Sequence
  Description of Artificial Sequence: Synthetic primer
tgtatccgtcacctcctcat

SEQ ID NO: 2394 - DNA, 20 bp, Artificial Sequence
  Description of Artificial Sequence: Synthetic primer
gctcttcacccagtcaaaga

SEQ ID NO: 2395 - DNA, 20 bp, Artificial Sequence
  Description of Artificial Sequence: Synthetic primer
cctgttcccagcttttaacc

SEQ ID NO: 2396 - DNA, 20 bp, Artificial Sequence
  Description of Artificial Sequence: Synthetic primer
gttaccggagaggatggatt

SEQ ID NO: 2397 - DNA, 20 bp, Artificial Sequence
  Description of Artificial Sequence: Synthetic primer
gtcaagcccatctgtgactc

SEQ ID NO: 2398 - DNA, 20 bp, Artificial Sequence
  Description of Artificial Sequence: Synthetic primer
taggtggatagaacaccgga

SEQ ID NO: 2399 - DNA, 20 bp, Artificial Sequence
  Description of Artificial Sequence: Synthetic primer
cgtcaccaaaaccctacaac

SEQ ID NO: 2400 - DNA, 20 bp, Artificial Sequence
  Description of Artificial Sequence: Synthetic primer
gaccaatagcaagagcaagc

SEQ ID NO: 2401 - DNA, 20 bp, Artificial Sequence
  Description of Artificial Sequence: Synthetic primer
aatatgggctatcagagggc

SEQ ID NO: 2402 - DNA, 20 bp, Artificial Sequence
  Description of Artificial Sequence: Synthetic primer
ccccatatccataacttccc

SEQ ID NO: 2403 - DNA, 20 bp, Artificial Sequence
  Description of Artificial Sequence: Synthetic primer
gcatctgacgcttgtagctc

SEQ ID NO: 2404 - DNA, 20 bp, Artificial Sequence
  Description of Artificial Sequence: Synthetic primer
gttggctatgattggacgac

SEQ ID NO: 2405 - DNA, 20 bp, Artificial Sequence
  Description of Artificial Sequence: Synthetic primer
cggaagcacgatgaactaga

SEQ ID NO: 2406 - DNA, 20 bp, Artificial Sequence
  Description of Artificial Sequence: Synthetic primer
agccccacttaccatgatct

SEQ ID NO: 2407 - DNA, 20 bp, Artificial Sequence
  Description of Artificial Sequence: Synthetic primer
ccgggactttttactccttc

SEQ ID NO: 2408 - DNA, 20 bp, Artificial Sequence
  Description of Artificial Sequence: Synthetic primer
atgcacctaagtccacagga

SEQ ID NO: 2409 - DNA, 20 bp, Artificial Sequence
  Description of Artificial Sequence: Synthetic primer
gaccagccaacacaaagaac

SEQ ID NO: 2410 - DNA, 20 bp, Artificial Sequence
  Description of Artificial Sequence: Synthetic primer
taacctaccaactcgcttgc

SEQ ID NO: 2411 - DNA, 20 bp, Artificial Sequence
  Description of Artificial Sequence: Synthetic primer
gcttcgacaggcagttatgt

SEQ ID NO: 2412 - DNA, 20 bp, Artificial Sequence
  Description of Artificial Sequence: Synthetic primer
gacacgtcatttccaccttc

SEQ ID NO: 2413 - DNA, 20 bp, Artificial Sequence
  Description of Artificial Sequence: Synthetic primer
tctctcctgcaagaagctgt

SEQ ID NO: 2414 - DNA, 20 bp, Artificial Sequence
  Description of Artificial Sequence: Synthetic primer
gaaggaaaaagaggcgtacc

SEQ ID NO: 2415 - DNA, 20 bp, Artificial Sequence
  Description of Artificial Sequence: Synthetic primer
gagaggatggctataagggg

SEQ ID NO: 2416 - DNA, 20 bp, Artificial Sequence
  Description of Artificial Sequence: Synthetic primer
gttttgtagcacaagtccgc

SEQ ID NO: 2417 - DNA, 20 bp, Artificial Sequence
  Description of Artificial Sequence: Synthetic primer
gtgttggtgtgtgctatcca

SEQ ID NO: 2418 - DNA, 20 bp, Artificial Sequence
  Description of Artificial Sequence: Synthetic primer
accttcactcacaaagctcg

SEQ ID NO: 2419 - DNA, 20 bp, Artificial Sequence
  Description of Artificial Sequence: Synthetic primer
ggatgacaagaggacgtgag

SEQ ID NO: 2420 - DNA, 20 bp, Artificial Sequence
  Description of Artificial Sequence: Synthetic primer
ttcacgctcgagtcttaacc

SEQ ID NO: 2421 - DNA, 20 bp, Artificial Sequence
  Description of Artificial Sequence: Synthetic primer
aaatcctcaagactggtccc

SEQ ID NO: 2422 - DNA, 20 bp, Artificial Sequence
  Description of Artificial Sequence: Synthetic primer
cgagaatcttccccgagtat

SEQ ID NO: 2423 - DNA, 20 bp, Artificial Sequence
  Description of Artificial Sequence: Synthetic primer
gacctcgctccctaattaca

SEQ ID NO: 2424 - DNA, 20 bp, Artificial Sequence
  Description of Artificial Sequence: Synthetic primer
ggagattcttggaggaagga

SEQ ID NO: 2425 - DNA, 20 bp, Artificial Sequence
  Description of Artificial Sequence: Synthetic primer
ttctccagaacatccgagtg

SEQ ID NO: 2426 - DNA, 20 bp, Artificial Sequence
  Description of Artificial Sequence: Synthetic primer
ctagcaccagccgtaacaat

SEQ ID NO: 2427 - DNA, 20 bp, Artificial Sequence
  Description of Artificial Sequence: Synthetic primer
tggtgctgatgatacagtgg

SEQ ID NO: 2428 - DNA, 18 bp, Artificial Sequence
  Description of Artificial Sequence: Synthetic primer
tcatcatagtgcttgcgg

SEQ ID NO: 2429 - DNA, 20 bp, Artificial Sequence
  Description of Artificial Sequence: Synthetic primer
cactgctcttacggattgct

SEQ ID NO: 2430 - DNA, 20 bp, Artificial Sequence
  Description of Artificial Sequence: Synthetic primer
tacttgacctactggcaggc

SEQ ID NO: 2431 - DNA, 20 bp, Artificial Sequence
  Description of Artificial Sequence: Synthetic primer
agcggtcatgagtcgattag

SEQ ID NO: 2432 - DNA, 20 bp, Artificial Sequence
  Description of Artificial Sequence: Synthetic primer
gaacgggtctccaaggttat

SEQ ID NO: 2433 - DNA, 20 bp, Artificial Sequence
  Description of Artificial Sequence: Synthetic primer
cataagccgaagtcacccta

SEQ ID NO: 2434 - DNA, 20 bp, Artificial Sequence
  Description of Artificial Sequence: Synthetic primer
cagtactgacggcgacttct

SEQ ID NO: 2435 - DNA, 20 bp, Artificial Sequence
  Description of Artificial Sequence: Synthetic primer
gcacagctccactcatcttt

SEQ ID NO: 2436 - DNA, 19 bp, Artificial Sequence
  Description of Artificial Sequence: Synthetic primer
aggataaccatagcccggt

SEQ ID NO: 2437 - DNA, 20 bp, Artificial Sequence
  Description of Artificial Sequence: Synthetic primer
gagaagttttctcgcgtgtg

SEQ ID NO: 2438 - DNA, 20 bp, Artificial Sequence
  Description of Artificial Sequence: Synthetic primer
ctagaacgtcggaaggttga

SEQ ID NO: 2439 - DNA, 20 bp, Artificial Sequence
  Description of Artificial Sequence: Synthetic primer
tcgtgtcacgtggaacatac

SEQ ID NO: 2440 - DNA, 20 bp, Artificial Sequence
  Description of Artificial Sequence: Synthetic primer
agcatctcaacgatgcctac

SEQ ID NO: 2441 - DNA, 20 bp, Artificial Sequence
  Description of Artificial Sequence: Synthetic primer
tgatgacacccttgacagtg

SEQ ID NO: 2442 - DNA, 20 bp, Artificial Sequence
  Description of Artificial Sequence: Synthetic primer
gcctctgctctcctctttct

SEQ ID NO: 2443 - DNA, 20 bp, Artificial Sequence
  Description of Artificial Sequence: Synthetic primer
ctgtgaagccacatcaacac

SEQ ID NO: 2444 - DNA, 20 bp, Artificial Sequence
  Description of Artificial Sequence: Synthetic primer
gccgacgtaacagaacagat

SEQ ID NO: 2445 - DNA, 20 bp, Artificial Sequence
  Description of Artificial Sequence: Synthetic primer
gaggcccatattctccaatc

SEQ ID NO: 2446 - DNA, 20 bp, Artificial Sequence
  Description of Artificial Sequence: Synthetic primer
ccgagtgagctgtggttagt

SEQ ID NO: 2447 - DNA, 20 bp, Artificial Sequence
  Description of Artificial Sequence: Synthetic primer
tgttaaactcacctccggtc

SEQ ID NO: 2448 - DNA, 20 bp, Artificial Sequence
  Description of Artificial Sequence: Synthetic primer
ccgagctctttcctagcttt

SEQ ID NO: 2449 - DNA, 20 bp, Artificial Sequence
  Description of Artificial Sequence: Synthetic primer
ggatcctcacattcatctgc

SEQ ID NO: 2450 - DNA, 20 bp, Artificial Sequence
  Description of Artificial Sequence: Synthetic primer
caaacacaccttgttcctcc

SEQ ID NO: 2451 - DNA, 20 bp, Artificial Sequence
  Description of Artificial Sequence: Synthetic primer
cccaacctcatcttctcctc

SEQ ID NO: 2452 - DNA, 20 bp, Artificial Sequence
  Description of Artificial Sequence: Synthetic primer
gtaggacgcgtaacgatctc

SEQ ID NO: 2453 - DNA, 20 bp, Artificial Sequence
  Description of Artificial Sequence: Synthetic primer
gtgacgatggatgtaaaggc

SEQ ID NO: 2454 - DNA, 20 bp, Artificial Sequence
  Description of Artificial Sequence: Synthetic primer
cagaccacactatttccccc

SEQ ID NO: 2455 - DNA, 20 bp, Artificial Sequence
  Description of Artificial Sequence: Synthetic primer
gcagctgaatctccaacact

SEQ ID NO: 2456 - DNA, 20 bp, Artificial Sequence
  Description of Artificial Sequence: Synthetic primer
tgatcggaggaggtagtcag

SEQ ID NO: 2457 - DNA, 20 bp, Artificial Sequence
  Description of Artificial Sequence: Synthetic primer
gtcttcaggatgcaccattc

SEQ ID NO: 2458 - DNA, 20 bp, Artificial Sequence
  Description of Artificial Sequence: Synthetic primer
gtcttcaggatgcaccattc

SEQ ID NO: 2459 - DNA, 20 bp, Artificial Sequence
  Description of Artificial Sequence: Synthetic primer
ttccctttaggctgtgagtg

SEQ ID NO: 2460 - DNA, 20 bp, Artificial Sequence
  Description of Artificial Sequence: Synthetic primer
gtgtgagagggagattgtgg

SEQ ID NO: 2461 - DNA, 20 bp, Artificial Sequence
  Description of Artificial Sequence: Synthetic primer
ccaaccagatccacaagaag

SEQ ID NO: 2462 - DNA, 20 bp, Artificial Sequence
  Description of Artificial Sequence: Synthetic primer
agatccacacaagctccaag

SEQ ID NO: 2463 - DNA, 20 bp, Artificial Sequence
  Description of Artificial Sequence: Synthetic primer
gaacggtagacggagcacta

SEQ ID NO: 2464 - DNA, 20 bp, Artificial Sequence
  Description of Artificial Sequence: Synthetic primer
agatggaggggtatgagagg

SEQ ID NO: 2465 - DNA, 20 bp, Artificial Sequence
  Description of Artificial Sequence: Synthetic primer
aaaaccccacatctctctcc

SEQ ID NO: 2466 - DNA, 20 bp, Artificial Sequence
  Description of Artificial Sequence: Synthetic primer
aggaggaaaaagggggtact

SEQ ID NO: 2467 - DNA, 20 bp, Artificial Sequence
  Description of Artificial Sequence: Synthetic primer
ctccttcttcttcgccttct

SEQ ID NO: 2468 - DNA, 20 bp, Artificial Sequence
  Description of Artificial Sequence: Synthetic primer
agcatcttagcctcagggtt

SEQ ID NO: 2469 - DNA, 20 bp, Artificial Sequence
  Description of Artificial Sequence: Synthetic primer
ggagaagacgataagcacca

SEQ ID NO: 2470 - DNA, 20 bp, Artificial Sequence
  Description of Artificial Sequence: Synthetic primer
aagatcccaagaacccagtc

SEQ ID NO: 2471 - DNA, 20 bp, Artificial Sequence
  Description of Artificial Sequence: Synthetic primer
atcagcgctagatgcttcac

SEQ ID NO: 2472 - DNA, 20 bp, Artificial Sequence
  Description of Artificial Sequence: Synthetic primer
cgactaatgggtcgaatgag

SEQ ID NO: 2473 - DNA, 20 bp, Artificial Sequence
  Description of Artificial Sequence: Synthetic primer
gctccagatggagtcgttta

SEQ ID NO: 2474 - DNA, 20 bp, Artificial Sequence
  Description of Artificial Sequence: Synthetic primer
cctgttgtcctgcttgttct

SEQ ID NO: 2475 - DNA, 20 bp, Artificial Sequence
  Description of Artificial Sequence: Synthetic primer
atctcaacctcctcaaaccc

SEQ ID NO: 2476 - DNA, 20 bp, Artificial Sequence
  Description of Artificial Sequence: Synthetic primer
cacgtgttctttctcagcct

SEQ ID NO: 2477 - DNA, 20 bp, Artificial Sequence
  Description of Artificial Sequence: Synthetic primer
cacacacgtgtactcctcca

SEQ ID NO: 2478 - DNA, 20 bp, Artificial Sequence
  Description of Artificial Sequence: Synthetic primer
ctgctggtaccgacattctt

SEQ ID NO: 2479 - DNA, 20 bp, Artificial Sequence
  Description of Artificial Sequence: Synthetic primer
gcatagtggctcctgttgtc

SEQ ID NO: 2480 - DNA, 20 bp, Artificial Sequence
  Description of Artificial Sequence: Synthetic primer
gtcatcctaaacgctgtcgt

SEQ ID NO: 2481 - DNA, 20 bp, Artificial Sequence
  Description of Artificial Sequence: Synthetic primer
cagttggaccaccagtaacc

SEQ ID NO: 2482 - DNA, 20 bp, Artificial Sequence
  Description of Artificial Sequence: Synthetic primer
tacatgtgtaactgtgggcg

SEQ ID NO: 2483 - DNA, 20 bp, Artificial Sequence
  Description of Artificial Sequence: Synthetic primer
gagacccgacagattgattg

SEQ ID NO: 2484 - DNA, 20 bp, Artificial Sequence
  Description of Artificial Sequence: Synthetic primer
ccgactccttcttgaacaga

SEQ ID NO: 2485 - DNA, 20 bp, Artificial Sequence
  Description of Artificial Sequence: Synthetic primer
actgagtcaacccggtcata

SEQ ID NO: 2486 - DNA, 20 bp, Artificial Sequence
  Description of Artificial Sequence: Synthetic primer
tggttcacaccctctgttct

SEQ ID NO: 2487 - DNA, 20 bp, Artificial Sequence
  Description of Artificial Sequence: Synthetic primer
cgctcaaccagtttagcatc

SEQ ID NO: 2488 - DNA, 20 bp, Artificial Sequence
  Description of Artificial Sequence: Synthetic primer
ccacctgattattcgacgac

SEQ ID NO: 2489 - DNA, 20 bp, Artificial Sequence
  Description of Artificial Sequence: Synthetic primer
taacacgtgggtaacaccct

SEQ ID NO: 2490 - DNA, 20 bp, Artificial Sequence
  Description of Artificial Sequence: Synthetic primer
tcagtttcttgccctgctac

SEQ ID NO: 2491 - DNA, 20 bp, Artificial Sequence
  Description of Artificial Sequence: Synthetic primer
cctaggagaaccccacttgt

SEQ ID NO: 2492 - DNA, 20 bp, Artificial Sequence
  Description of Artificial Sequence: Synthetic primer
gcaacgagttcagaccactc

SEQ ID NO: 2493 - DNA, 20 bp, Artificial Sequence
  Description of Artificial Sequence: Synthetic primer
ataacagctctgccttcacg

SEQ ID NO: 2494 - DNA, 20 bp, Artificial Sequence
  Description of Artificial Sequence: Synthetic primer
ggatcagaaccttcatgcac

SEQ ID NO: 2495 - DNA, 20 bp, Artificial Sequence
  Description of Artificial Sequence: Synthetic primer
gctctcaagttactgcagcc

SEQ ID NO: 2496 - DNA, 20 bp, Artificial Sequence
  Description of Artificial Sequence: Synthetic primer
cctcttaaccagaggcacaa

SEQ ID NO: 2497 - DNA, 20 bp, Artificial Sequence
  Description of Artificial Sequence: Synthetic primer
caccactgttatcagcacca

SEQ ID NO: 2498 - DNA, 20 bp, Artificial Sequence
  Description of Artificial Sequence: Synthetic primer
atctccaccatccttcctct

SEQ ID NO: 2499 - DNA, 20 bp, Artificial Sequence
  Description of Artificial Sequence: Synthetic primer
gcttctctagttcgcagtcg

SEQ ID NO: 2500 - DNA, 20 bp, Artificial Sequence
  Description of Artificial Sequence: Synthetic primer
ccacacaccttcacaactca

SEQ ID NO: 2501 - DNA, 20 bp, Artificial Sequence
  Description of Artificial Sequence: Synthetic primer
acagccaccactctaaccac

SEQ ID NO: 2502 - DNA, 20 bp, Artificial Sequence
  Description of Artificial Sequence: Synthetic primer
aaacatagactcgaaccccc

SEQ ID NO: 2503 - DNA, 20 bp, Artificial Sequence
  Description of Artificial Sequence: Synthetic primer
cgggtttgctgacttacact

SEQ ID NO: 2504 - DNA, 20 bp, Artificial Sequence
  Description of Artificial Sequence: Synthetic primer
gaacctcttaaccgctctcc

SEQ ID NO: 2505 - DNA, 20 bp, Artificial Sequence
  Description of Artificial Sequence: Synthetic primer
gattcaggattcaggtcacg

SEQ ID NO: 2506 - DNA, 20 bp, Artificial Sequence
  Description of Artificial Sequence: Synthetic primer
gttacacccaggttggtctg

SEQ ID NO: 2507 - DNA, 20 bp, Artificial Sequence
  Description of Artificial Sequence: Synthetic primer
cagacaaccctgttgaaacc

SEQ ID NO: 2508 - DNA, 20 bp, Artificial Sequence
  Description of Artificial Sequence: Synthetic primer
gtcttcaggatgcaccattc

SEQ ID NO: 2509 - DNA, 20 bp, Artificial Sequence
  Description of Artificial Sequence: Synthetic primer
tagggcttgtgtgaccactt

SEQ ID NO: 2510 - DNA, 20 bp, Artificial Sequence
  Description of Artificial Sequence: Synthetic primer
taagttagcccgttgtcgag

SEQ ID NO: 2511 - DNA, 20 bp, Artificial Sequence
  Description of Artificial Sequence: Synthetic primer
cttgtagtgcatttcccacc

SEQ ID NO: 2512 - DNA, 20 bp, Artificial Sequence
  Description of Artificial Sequence: Synthetic primer
caccttcctgaatgatctgg

SEQ ID NO: 2513 - DNA, 20 bp, Artificial Sequence
  Description of Artificial Sequence: Synthetic primer
cttccttcttcactggcgta

SEQ ID NO: 2514 - DNA, 20 bp, Artificial Sequence
  Description of Artificial Sequence: Synthetic primer
gccttctgtcaaacactgct

SEQ ID NO: 2515 - DNA, 20 bp, Artificial Sequence
  Description of Artificial Sequence: Synthetic primer
agcactgacgactaacccac

SEQ ID NO: 2516 - DNA, 20 bp, Artificial Sequence
  Description of Artificial Sequence: Synthetic primer
catcaccgtcatcaccagta

SEQ ID NO: 2517 - DNA, 20 bp, Artificial Sequence
  Description of Artificial Sequence: Synthetic primer
ctacagccaaggaatgtgct

SEQ ID NO: 2518 - DNA, 20 bp, Artificial Sequence
  Description of Artificial Sequence: Synthetic primer
catcgatacaccgatcttcc

SEQ ID NO: 2519 - DNA, 20 bp, Artificial Sequence
  Description of Artificial Sequence: Synthetic primer
tctgagaacagaggacaggg

SEQ ID NO: 2520 - DNA, 20 bp, Artificial Sequence
  Description of Artificial Sequence: Synthetic primer
tgtcctgagcctcatactcc

SEQ ID NO: 2521 - DNA, 20 bp, Artificial Sequence
  Description of Artificial Sequence: Synthetic primer
gaacaggaggctgttgaaga

SEQ ID NO: 2522 - DNA, 20 bp, Artificial Sequence
  Description of Artificial Sequence: Synthetic primer
ccaaccagatccacaagaag

SEQ ID NO: 2523 - DNA, 20 bp, Artificial Sequence
  Description of Artificial Sequence: Synthetic primer
accagagtctccctctgctt

SEQ ID NO: 2524 - DNA, 20 bp, Artificial Sequence
  Description of Artificial Sequence: Synthetic primer
gtgctccatataatccccct

SEQ ID NO: 2525 - DNA, 20 bp, Artificial Sequence
  Description of Artificial Sequence: Synthetic primer
gtaggtgtaatgtgggggtg

SEQ ID NO: 2526 - DNA, 20 bp, Artificial Sequence
  Description of Artificial Sequence: Synthetic primer
caagtgtaaccaggaggtgg

SEQ ID NO: 2527 - DNA, 20 bp, Artificial Sequence
  Description of Artificial Sequence: Synthetic primer
gagctgaatctttcgctctg

SEQ ID NO: 2528 - DNA, 20 bp, Artificial Sequence
  Description of Artificial Sequence: Synthetic primer
cagtcggagtaaaccctgaa

SEQ ID NO: 2529 - DNA, 20 bp, Artificial Sequence
  Description of Artificial Sequence: Synthetic primer
ctcttgagaagcatcacggt

SEQ ID NO: 2530 - DNA, 20 bp, Artificial Sequence
  Description of Artificial Sequence: Synthetic primer
accccaacacgactgtttac

SEQ ID NO: 2531 - DNA, 20 bp, Artificial Sequence
  Description of Artificial Sequence: Synthetic primer
gatggtgatctcatggaagc

SEQ ID NO: 2532 - DNA, 20 bp, Artificial Sequence
  Description of Artificial Sequence: Synthetic primer
tgaacatgagcctccttagc

SEQ ID NO: 2533 - DNA, 20 bp, Artificial Sequence
  Description of Artificial Sequence: Synthetic primer
acattcatcccctcctcttc

SEQ ID NO: 2534 - DNA, 20 bp, Artificial Sequence
  Description of Artificial Sequence: Synthetic primer
aaaccacttctcacagcagc

SEQ ID NO: 2535 - DNA, 12 bp, Parthenium argentatum
catcatcatcat

SEQ ID NO: 2536 - DNA, 12 bp, Parthenium argentatum
catcatcatcat

SEQ ID NO: 2537 - DNA, 45 bp, Parthenium argentatum
tcttcttcttcttcttcttcttcttcttcttctacaacaacaaca

SEQ ID NO: 2538 - DNA, 12 bp, Parthenium argentatum
caccaccaccac

SEQ ID NO: 2539 - DNA, 18 bp, Parthenium argentatum
cacacacacacacacaca

SEQ ID NO: 2540 - DNA, 12 bp, Parthenium argentatum
aagaagaagaag

SEQ ID NO: 2541 - DNA, 12 bp, Parthenium argentatum
tattattattat

SEQ ID NO: 2542 - DNA, 12 bp, Parthenium argentatum
gtcgtcgtcgtc

SEQ ID NO: 2543 - DNA, 30 bp, Parthenium argentatum
caaccacaaccacaaccacaaccacaacca

SEQ ID NO: 2544 - DNA, 15 bp, Parthenium argentatum
gaagaagaagaagaa

SEQ ID NO: 2545 - DNA, 12 bp, Parthenium argentatum
ccgccgccgccg

SEQ ID NO: 2546 - DNA, 16 bp, Parthenium argentatum
cacacacacacacaca

SEQ ID NO: 2547 - DNA, 12 bp, Parthenium argentatum
ttcttcttcttc

SEQ ID NO: 2548 - DNA, 12 bp, Parthenium argentatum
accaccaccacc

SEQ ID NO: 2549 - DNA, 24 bp, Parthenium argentatum
tcttcttcttctacacacacacac

SEQ ID NO: 2550 - DNA, 12 bp, Parthenium argentatum
acaacaacaaca

SEQ ID NO: 2551 - DNA, 12 bp, Parthenium argentatum
aagaagaagaag

SEQ ID NO: 2552 - DNA, 12 bp, Parthenium argentatum
tcctcctcctcc

SEQ ID NO: 2553 - DNA, 12 bp, Parthenium argentatum
ccaccaccacca

SEQ ID NO: 2554 - DNA, 12 bp, Parthenium argentatum
aacaacaacaac

SEQ ID NO: 2555 - DNA, 27 bp, Parthenium argentatum
caccaccaccaccacccaccaccacca

SEQ ID NO: 2556 - DNA, 15 bp, Parthenium argentatum
taataataataataa

SEQ ID NO: 2557 - DNA, 16 bp, Parthenium argentatum
acatacatacatacat

SEQ ID NO: 2558 - DNA, 18 bp, Parthenium argentatum
aacaacaacaacaacaac

SEQ ID NO: 2559 - DNA, 12 bp, Parthenium argentatum
tgtgtgtgtgtg

SEQ ID NO: 2560 - DNA, 12 bp, Parthenium argentatum
gaggaggaggag

SEQ ID NO: 2561 - DNA, 12 bp, Parthenium argentatum
ataataataata

SEQ ID NO: 2562 - DNA, 12 bp, Parthenium argentatum
gctgctgctgct

SEQ ID NO: 2563 - DNA, 12 bp, Parthenium argentatum
tcttcttcttct

SEQ ID NO: 2564 - DNA, 12 bp, Parthenium argentatum
cacacacacaca

SEQ ID NO: 2565 - DNA, 15 bp, Parthenium argentatum
aataataataataat

SEQ ID NO: 2566 - DNA, 12 bp, Parthenium argentatum
acaacaacaaca

SEQ ID NO: 2567 - DNA, 24 bp, Parthenium argentatum
attattattattcacacacacaca

SEQ ID NO: 2568 - DNA, 18 bp, Parthenium argentatum
taataataataataataa

SEQ ID NO: 2569 - DNA, 12 bp, Parthenium argentatum
ttgttgttgttg

SEQ ID NO: 2570 - DNA, 12 bp, Parthenium argentatum
tcatcatcatca

SEQ ID NO: 2571 - DNA, 12 bp, Parthenium argentatum
acaacaacaaca

SEQ ID NO: 2572 - DNA, 24 bp, Parthenium argentatum
acaaccacaaccacaaccacaacc

SEQ ID NO: 2573 - DNA, 12 bp, Parthenium argentatum
agaagaagaaga

SEQ ID NO: 2574 - DNA, 15 bp, Parthenium argentatum
ctcctcctcctcctc

SEQ ID NO: 2575 - DNA, 15 bp, Parthenium argentatum
tggtggtggtggtgg

SEQ ID NO: 2576 - DNA, 15 bp, Parthenium argentatum
gacgacgacgacgac

SEQ ID NO: 2577 - DNA, 12 bp, Parthenium argentatum
tactactactac

SEQ ID NO: 2578 - DNA, 12 bp, Parthenium argentatum
ccaccaccacca

SEQ ID NO: 2579 - DNA, 12 bp, Parthenium argentatum
ctctctctctct

SEQ ID NO: 2580 - DNA, 12 bp, Parthenium argentatum
aggaggaggagg

SEQ ID NO: 2581 - DNA, 12 bp, Parthenium argentatum
tctctctctctc

SEQ ID NO: 2582 - DNA, 12 bp, Parthenium argentatum
gaggaggaggag

SEQ ID NO: 2583 - DNA, 12 bp, Parthenium argentatum
tgatgatgatga

SEQ ID NO: 2584 - DNA, 12 bp, Parthenium argentatum
tcgtcgtcgtcg

SEQ ID NO: 2585 - DNA, 12 bp, Parthenium argentatum
ttcttcttcttc

SEQ ID NO: 2586 - DNA, 28 bp, Parthenium argentatum
taataataataatgcctgcctgcctgcc

SEQ ID NO: 2587 - DNA, 12 bp, Parthenium argentatum
tggtggtggtgg

SEQ ID NO: 2588 - DNA, 12 bp, Parthenium argentatum
gatgatgatgat

SEQ ID NO: 2589 - DNA, 12 bp, Parthenium argentatum
tatatatatata

SEQ ID NO: 2590 - DNA, 15 bp, Parthenium argentatum
tcctcctcctcctcc

SEQ ID NO: 2591 - DNA, 18 bp, Parthenium argentatum
ataataataataataata

SEQ ID NO: 2592 - DNA, 15 bp, Parthenium argentatum
gatgatgatgatgat

SEQ ID NO: 2593 - DNA, 18 bp, Parthenium argentatum
acacacacacacacacac

SEQ ID NO: 2594 - DNA, 12 bp, Parthenium argentatum
accaccaccacc

SEQ ID NO: 2595 - DNA, 30 bp, Parthenium argentatum
aacaacaacaacaacaactgatgatgatga

SEQ ID NO: 2596 - DNA, 12 bp, Parthenium argentatum
ccaccaccacca

SEQ ID NO: 2597 - DNA, 15 bp, Parthenium argentatum
gccgccgccgccgcc

SEQ ID NO: 2598 - DNA, 12 bp, Parthenium argentatum
ggaggaggagga

SEQ ID NO: 2599 - DNA, 15 bp, Parthenium argentatum
ttgttgttgttgttg

SEQ ID NO: 2600 - DNA, 15 bp, Parthenium argentatum
accaccaccaccacc

SEQ ID NO: 2601 - DNA, 27 bp, Parthenium argentatum
aataataataattcctcctcctcctcc

SEQ ID NO: 2602 - DNA, 18 bp, Parthenium argentatum
aacaacaacaacaacaac

SEQ ID NO: 2603 - DNA, 12 bp, Parthenium argentatum
agagagagagag

SEQ ID NO: 2604 - DNA, 18 bp, Parthenium argentatum
atgatgatgatgatgatg

SEQ ID NO: 2605 - DNA, 12 bp, Parthenium argentatum
gatgatgatgat

SEQ ID NO: 2606 - DNA, 15 bp, Parthenium argentatum
taataataataataa

SEQ ID NO: 2607 - DNA, 16 bp, Parthenium argentatum
tctctctctctctctc

SEQ ID NO: 2608 - DNA, 12 bp, Parthenium argentatum
ggtggtggtggt

SEQ ID NO: 2609 - DNA, 12 bp, Parthenium argentatum
ccaccaccacca

SEQ ID NO: 2610 - DNA, 15 bp, Parthenium argentatum
tactactactactac

SEQ ID NO: 2611 - DNA, 12 bp, Parthenium argentatum
aacaacaacaac

SEQ ID NO: 2612 - DNA, 12 bp, Parthenium argentatum
tcttcttcttct

SEQ ID NO: 2613 - DNA, 15 bp, Parthenium argentatum
atgatgatgatgatg

SEQ ID NO: 2614 - DNA, 24 bp, Parthenium argentatum
aaccgaaaccgaaaccgaaaccga

SEQ ID NO: 2615 - DNA, 12 bp, Parthenium argentatum
cagcagcagcag

SEQ ID NO: 2616 - DNA, 15 bp, Parthenium argentatum
ccaccaccaccacca

SEQ ID NO: 2617 - DNA, 12 bp, Parthenium argentatum
caccaccaccac

SEQ ID NO: 2618 - DNA, 12 bp, Parthenium argentatum
ccaccaccacca

SEQ ID NO: 2619 - DNA, 12 bp, Parthenium argentatum
aataataataat

SEQ ID NO: 2620 - DNA, 12 bp, Parthenium argentatum
tgatgatgatga

SEQ ID NO: 2621 - DNA, 12 bp, Parthenium argentatum
ccaccaccacca

SEQ ID NO: 2622 - DNA, 12 bp, Parthenium argentatum
ttattattatta

SEQ ID NO: 2623 - DNA, 16 bp, Parthenium argentatum
ctatctatctatctat

SEQ ID NO: 2624 - DNA, 12 bp, Parthenium argentatum
caccaccaccac

SEQ ID NO: 2625 - DNA, 12 bp, Parthenium argentatum
tactactactac

SEQ ID NO: 2626 - DNA, 12 bp, Parthenium argentatum
caccaccaccac

SEQ ID NO: 2627 - DNA, 16 bp, Parthenium argentatum
tcactcactcactcac

SEQ ID NO: 2628 - DNA, 12 bp, Parthenium argentatum
aataataataat

SEQ ID NO: 2629 - DNA, 12 bp, Parthenium argentatum
atgatgatgatg

SEQ ID NO: 2630 - DNA, 33 bp, Parthenium argentatum
agcagcagcagcagcagctgatgatgatgatga

SEQ ID NO: 2631 - DNA, 12 bp, Parthenium argentatum
ataataataata

SEQ ID NO: 2632 - DNA, 12 bp, Parthenium argentatum
aggaggaggagg

SEQ ID NO: 2633 - DNA, 12 bp, Parthenium argentatum
gatgatgatgat

SEQ ID NO: 2634 - DNA, 12 bp, Parthenium argentatum
caacaacaacaa

SEQ ID NO: 2635 - DNA, 12 bp, Parthenium argentatum
ggtggtggtggt

SEQ ID NO: 2636 - DNA, 15 bp, Parthenium argentatum
ctactactactacta

SEQ ID NO: 2637 - DNA, 12 bp, Parthenium argentatum
tggtggtggtgg

SEQ ID NO: 2638 - DNA, 15 bp, Parthenium argentatum
agaagaagaagaaga

SEQ ID NO: 2639 - DNA, 12 bp, Parthenium argentatum
tcctcctcctcc

SEQ ID NO: 2640 - DNA, 24 bp, Parthenium argentatum
tctctctctctccaccaccaccac

SEQ ID NO: 2641 - DNA, 12 bp, Parthenium argentatum
tgatgatgatga

SEQ ID NO: 2642 - DNA, 16 bp, Parthenium argentatum
ctctctctctctctct

SEQ ID NO: 2643 - DNA, 12 bp, Parthenium argentatum
attattattatt

SEQ ID NO: 2644 - DNA, 16 bp, Parthenium argentatum
tctctctctctctctc

SEQ ID NO: 2645 - DNA, 15 bp, Parthenium argentatum
atgatgatgatgatg

SEQ ID NO: 2646 - DNA, 16 bp, Parthenium argentatum
agagagagagagagag

SEQ ID NO: 2647 - DNA, 12 bp, Parthenium argentatum
gtggtggtggtg

SEQ ID NO: 2648 - DNA, 27 bp, Parthenium argentatum
ttcttcttcttcttcaccaccaccacc

SEQ ID NO: 2649 - DNA, 12 bp, Parthenium argentatum
gatgatgatgat

SEQ ID NO: 2650 - DNA, 12 bp, Parthenium argentatum
aagaagaagaag

SEQ ID NO: 2651 - DNA, 30 bp, Parthenium argentatum
tcatcatcatcatcattattattattatta

SEQ ID NO: 2652 - DNA, 12 bp, Parthenium argentatum
cttcttcttctt

SEQ ID NO: 2653 - DNA, 51 bp, Parthenium argentatum
cattcacattcacattcacattcatcatcatcatcatcaatgatgatgatg

SEQ ID NO: 2654 - DNA, 15 bp, Parthenium argentatum
ccaccaccaccacca

SEQ ID NO: 2655 - DNA, 30 bp, Parthenium argentatum
taataataataatcctcctcctcctcctcc

SEQ ID NO: 2656 - DNA, 12 bp, Parthenium argentatum
tgttgttgttgt

SEQ ID NO: 2657 - DNA, 12 bp, Parthenium argentatum
ataataataata

SEQ ID NO: 2658 - DNA, 14 bp, Parthenium argentatum
cacacacacacaca

SEQ ID NO: 2659 - DNA, 16 bp, Parthenium argentatum
tgcatgcatgcatgca

SEQ ID NO: 2660 - DNA, 12 bp, Parthenium argentatum
ccaccaccacca

SEQ ID NO: 2661 - DNA, 12 bp, Parthenium argentatum
ataataataata

SEQ ID NO: 2662 - DNA, 16 bp, Parthenium argentatum
agagagagagagagag

SEQ ID NO: 2663 - DNA, 12 bp, Parthenium argentatum
tctctctctctc

SEQ ID NO: 2664 - DNA, 18 bp, Parthenium argentatum
tagtagtagtagtagtag

SEQ ID NO: 2665 - DNA, 12 bp, Parthenium argentatum
atgatgatgatg

SEQ ID NO: 2666 - DNA, 12 bp, Parthenium argentatum
gaagaagaagaa

SEQ ID NO: 2667 - DNA, 12 bp, Parthenium argentatum
ttattattatta

SEQ ID NO: 2668 - DNA, 15 bp, Parthenium argentatum
tgatgatgatgatga

SEQ ID NO: 2669 - DNA, 12 bp, Parthenium argentatum
tcatcatcatca

SEQ ID NO: 2670 - DNA, 60 bp, Parthenium argentatum
cttcaccttcaccttcaccttcaccttcaccttcacctcctcctcctcaccaccaccacc

SEQ ID NO: 2671 - DNA, 12 bp, Parthenium argentatum
acaacaacaaca

SEQ ID NO: 2672 - DNA, 12 bp, Parthenium argentatum
acacacacacac

SEQ ID NO: 2673 - DNA, 27 bp, Parthenium argentatum
taataataataaatcatcatcatcatc

SEQ ID NO: 2674 - DNA, 12 bp, Parthenium argentatum
ttcttcttcttc

SEQ ID NO: 2675 - DNA, 27 bp, Parthenium argentatum
aataataataattaataataataataa

SEQ ID NO: 2676 - DNA, 12 bp, Parthenium argentatum
tggtggtggtgg

SEQ ID NO: 2677 - DNA, 12 bp, Parthenium argentatum
ccaccaccacca

SEQ ID NO: 2678 - DNA, 12 bp, Parthenium argentatum
gaagaagaagaa

SEQ ID NO: 2679 - DNA, 15 bp, Parthenium argentatum
aataataataataat

SEQ ID NO: 2680 - DNA, 15 bp, Parthenium argentatum
ataataataataata

SEQ ID NO: 2681 - DNA, 12 bp, Parthenium argentatum
attattattatt

SEQ ID NO: 2682 - DNA, 12 bp, Parthenium argentatum
gaagaagaagaa

SEQ ID NO: 2683 - DNA, 12 bp, Parthenium argentatum
tattattattat

SEQ ID NO: 2684 - DNA, 36 bp, Parthenium argentatum
atggtcatggtcatggtcatggtcatggtcatggtc

SEQ ID NO: 2685 - DNA, 16 bp, Parthenium argentatum
tctctctctctctctc

SEQ ID NO: 2686 - DNA, 12 bp, Parthenium argentatum
tcttcttcttct

SEQ ID NO: 2687 - DNA, 12 bp, Parthenium argentatum
cagcagcagcag

SEQ ID NO: 2688 - DNA, 12 bp, Parthenium argentatum
tcttcttcttct

SEQ ID NO: 2689 - DNA, 15 bp, Parthenium argentatum
gaagaagaagaagaa

SEQ ID NO: 2690 - DNA, 12 bp, Parthenium argentatum
tcctcctcctcc

SEQ ID NO: 2691 - DNA, 12 bp, Parthenium argentatum
agcagcagcagc

SEQ ID NO: 2692 - DNA, 24 bp, Parthenium argentatum
caggttcaggttcaggttcaggtt

SEQ ID NO: 2693 - DNA, 12 bp, Parthenium argentatum
ttattattatta

SEQ ID NO: 2694 - DNA, 15 bp, Parthenium argentatum
atgatgatgatgatg

SEQ ID NO: 2695 - DNA, 12 bp, Parthenium argentatum
catcatcatcat

SEQ ID NO: 2696 - DNA, 15 bp, Parthenium argentatum
atgatgatgatgatg

SEQ ID NO: 2697 - DNA, 12 bp, Parthenium argentatum
tcctcctcctcc

SEQ ID NO: 2698 - DNA, 12 bp, Parthenium argentatum
tattattattat

SEQ ID NO: 2699 - DNA, 16 bp, Parthenium argentatum
gagagagagagagaga

SEQ ID NO: 2700 - DNA, 12 bp, Parthenium argentatum
aataataataat

SEQ ID NO: 2701 - DNA, 12 bp, Parthenium argentatum
tattattattat

SEQ ID NO: 2702 - DNA, 15 bp, Parthenium argentatum
accaccaccaccacc

SEQ ID NO: 2703 - DNA, 12 bp, Parthenium argentatum
ttattattatta

SEQ ID NO: 2704 - DNA, 12 bp, Parthenium argentatum
caacaacaacaa

SEQ ID NO: 2705 - DNA, 15 bp, Parthenium argentatum
aataataataataat

SEQ ID NO: 2706 - DNA, 12 bp, Parthenium argentatum
ctcctcctcctc

SEQ ID NO: 2707 - DNA, 16 bp, Parthenium argentatum
tgtatgtatgtatgta

SEQ ID NO: 2708 - DNA, 12 bp, Parthenium argentatum
cagcagcagcag

SEQ ID NO: 2709 - DNA, 12 bp, Parthenium argentatum
cctcctcctcct

SEQ ID NO: 2710 - DNA, 15 bp, Parthenium argentatum
caacaacaacaacaa

SEQ ID NO: 2711 - DNA, 15 bp, Parthenium argentatum
aacaacaacaacaac

SEQ ID NO: 2712 - DNA, 12 bp, Parthenium argentatum
gatgatgatgat

SEQ ID NO: 2713 - DNA, 15 bp, Parthenium argentatum
caacaacaacaacaa

SEQ ID NO: 2714 - DNA, 12 bp, Parthenium argentatum
aagaagaagaag

SEQ ID NO: 2715 - DNA, 12 bp, Parthenium argentatum
cttcttcttctt

SEQ ID NO: 2716 - DNA, 12 bp, Parthenium argentatum
cgccgccgccgc

SEQ ID NO: 2717 - DNA, 15 bp, Parthenium argentatum
attattattattatt

SEQ ID NO: 2718 - DNA, 12 bp, Parthenium argentatum
gaagaagaagaa

SEQ ID NO: 2719 - DNA, 14 bp, Parthenium argentatum
cacacacacacaca

SEQ ID NO: 2720 - DNA, 16 bp, Parthenium argentatum
tgcatgcatgcatgca

SEQ ID NO: 2721 - DNA, 15 bp, Parthenium argentatum
gaagaagaagaagaa

SEQ ID NO: 2722 - DNA, 15 bp, Parthenium argentatum
cgacgacgacgacga

SEQ ID NO: 2723 - DNA, 12 bp, Parthenium argentatum
caccaccaccac

SEQ ID NO: 2724 - DNA, 12 bp, Parthenium argentatum
ccaccaccacca

SEQ ID NO: 2725 - DNA, 15 bp, Parthenium argentatum
cttcttcttcttctt

SEQ ID NO: 2726 - DNA, 12 bp, Parthenium argentatum
agaagaagaaga

SEQ ID NO: 2727 - DNA, 12 bp, Parthenium argentatum
aagaagaagaag

SEQ ID NO: 2728 - DNA, 12 bp, Parthenium argentatum
taataataataa

SEQ ID NO: 2729 - DNA, 12 bp, Parthenium argentatum
ttcttcttcttc

SEQ ID NO: 2730 - DNA, 12 bp, Parthenium argentatum
cttcttcttctt

SEQ ID NO: 2731 - DNA, 12 bp, Parthenium argentatum
tcttcttcttct

SEQ ID NO: 2732 - DNA, 12 bp, Parthenium argentatum
ctgctgctgctg

SEQ ID NO: 2733 - DNA, 18 bp, Artificial Sequence
  Description of Artificial Sequence: Synthetic primer
gaaaccatggcaaaaccc

SEQ ID NO: 2734 - DNA, 20 bp, Artificial Sequence
  Description of Artificial Sequence: Synthetic primer
atctgaacccagaacccttc

SEQ ID NO: 2735 - DNA, 20 bp, Artificial Sequence
  Description of Artificial Sequence: Synthetic primer
ctcaaaagcaccacccttag

SEQ ID NO: 2736 - DNA, 20 bp, Artificial Sequence
  Description of Artificial Sequence: Synthetic primer
ctcttcgaacggtctgaaac

SEQ ID NO: 2737 - DNA, 20 bp, Artificial Sequence
  Description of Artificial Sequence: Synthetic primer
taccctcctcagaccctacc

SEQ ID NO: 2738 - DNA, 20 bp, Artificial Sequence
  Description of Artificial Sequence: Synthetic primer
cacctaccttcttttggcct

SEQ ID NO: 2739 - DNA, 20 bp, Artificial Sequence
  Description of Artificial Sequence: Synthetic primer
ccgtaggtacaacaccgaac

SEQ ID NO: 2740 - DNA, 20 bp, Artificial Sequence
  Description of Artificial Sequence: Synthetic primer
gaactggctgtgaatgctct

SEQ ID NO: 2741 - DNA, 20 bp, Artificial Sequence
  Description of Artificial Sequence: Synthetic primer
gaactggctgtgaatgctct

SEQ ID NO: 2742 - DNA, 20 bp, Artificial Sequence
  Description of Artificial Sequence: Synthetic primer
gctccagtacgattacgacg

SEQ ID NO: 2743 - DNA, 20 bp, Artificial Sequence
  Description of Artificial Sequence: Synthetic primer
catcaccttcttcatcccac

SEQ ID NO: 2744 - DNA, 20 bp, Artificial Sequence
  Description of Artificial Sequence: Synthetic primer
ccctcctcagaccctatcat

SEQ ID NO: 2745 - DNA, 20 bp, Artificial Sequence
  Description of Artificial Sequence: Synthetic primer
cccaatgctcttccttcttc

SEQ ID NO: 2746 - DNA, 19 bp, Artificial Sequence
  Description of Artificial Sequence: Synthetic primer
gtcttccttccgcatgtct

SEQ ID NO: 2747 - DNA, 20 bp, Artificial Sequence
  Description of Artificial Sequence: Synthetic primer
tcatagccagagagactgcc

SEQ ID NO: 2748 - DNA, 20 bp, Artificial Sequence
  Description of Artificial Sequence: Synthetic primer
ggaggtcaggaactcaggat

SEQ ID NO: 2749 - DNA, 20 bp, Artificial Sequence
  Description of Artificial Sequence: Synthetic primer
ccatcagatgtcccaaagag

SEQ ID NO: 2750 - DNA, 20 bp, Artificial Sequence
  Description of Artificial Sequence: Synthetic primer
tcctcctaaatcctcgttcc

SEQ ID NO: 2751 - DNA, 20 bp, Artificial Sequence
  Description of Artificial Sequence: Synthetic primer
atcttcttcttcgtcccacc

SEQ ID NO: 2752 - DNA, 20 bp, Artificial Sequence
  Description of Artificial Sequence: Synthetic primer
ccactcctccaaaaccttct

SEQ ID NO: 2753 - DNA, 20 bp, Artificial Sequence
  Description of Artificial Sequence: Synthetic primer
gggtttcatcctcctcactt

SEQ ID NO: 2754 - DNA, 20 bp, Artificial Sequence
  Description of Artificial Sequence: Synthetic primer
cattatcagtaggctgggga

SEQ ID NO: 2755 - DNA, 20 bp, Artificial Sequence
  Description of Artificial Sequence: Synthetic primer
gccgaagaagacgtgtatgt

SEQ ID NO: 2756 - DNA, 20 bp, Artificial Sequence
  Description of Artificial Sequence: Synthetic primer
gttcttctccggttatgggt

SEQ ID NO: 2757 - DNA, 20 bp, Artificial Sequence
  Description of Artificial Sequence: Synthetic primer
aggacagctacacaagtggc

SEQ ID NO: 2758 - DNA, 20 bp, Artificial Sequence
  Description of Artificial Sequence: Synthetic primer
gacgccgtattacaatccac

SEQ ID NO: 2759 - DNA, 18 bp, Artificial Sequence
  Description of Artificial Sequence: Synthetic primer
cacccgagtccatcaaaa

SEQ ID NO: 2760 - DNA, 20 bp, Artificial Sequence
  Description of Artificial Sequence: Synthetic primer
cccactggaaccctaatctt

SEQ ID NO: 2761 - DNA, 20 bp, Artificial Sequence
  Description of Artificial Sequence: Synthetic primer
atgtatgatgctagcggctc

SEQ ID NO: 2762 - DNA, 20 bp, Artificial Sequence
  Description of Artificial Sequence: Synthetic primer
gtatgagggcttcagggatt

SEQ ID NO: 2763 - DNA, 20 bp, Artificial Sequence
  Description of Artificial Sequence: Synthetic primer
cccttgcttccacataacag

SEQ ID NO: 2764 - DNA, 20 bp, Artificial Sequence
  Description of Artificial Sequence: Synthetic primer
actgccagaagtgtttccag

SEQ ID NO: 2765 - DNA, 20 bp, Artificial Sequence
  Description of Artificial Sequence: Synthetic primer
aagtaccgacctggttgaca

SEQ ID NO: 2766 - DNA, 20 bp, Artificial Sequence
  Description of Artificial Sequence: Synthetic primer
aagaggaactcaagaagcgg

SEQ ID NO: 2767 - DNA, 20 bp, Artificial Sequence
  Description of Artificial Sequence: Synthetic primer
agtggatcatgtcttgctgc

SEQ ID NO: 2768 - DNA, 20 bp, Artificial Sequence
  Description of Artificial Sequence: Synthetic primer
cttgccctttctgtacgcta

SEQ ID NO: 2769 - DNA, 20 bp, Artificial Sequence
  Description of Artificial Sequence: Synthetic primer
cactccttcagtgacctcct

SEQ ID NO: 2770 - DNA, 20 bp, Artificial Sequence
  Description of Artificial Sequence: Synthetic primer
ggcaaaatcaggtacttccc

SEQ ID NO: 2771 - DNA, 20 bp, Artificial Sequence
  Description of Artificial Sequence: Synthetic primer
gaaccattatgcagctggtc

SEQ ID NO: 2772 - DNA, 20 bp, Artificial Sequence
  Description of Artificial Sequence: Synthetic primer
cgatacaccttcaaacggag

SEQ ID NO: 2773 - DNA, 20 bp, Artificial Sequence
  Description of Artificial Sequence: Synthetic primer
atacaggtcactggctctcg

SEQ ID NO: 2774 - DNA, 18 bp, Artificial Sequence
  Description of Artificial Sequence: Synthetic primer
tccttacaaacccaaccc

SEQ ID NO: 2775 - DNA, 20 bp, Artificial Sequence
  Description of Artificial Sequence: Synthetic primer
cgaggtacttccacaccaac

SEQ ID NO: 2776 - DNA, 20 bp, Artificial Sequence
  Description of Artificial Sequence: Synthetic primer
tagggttttctctgcgactg

SEQ ID NO: 2777 - DNA, 20 bp, Artificial Sequence
  Description of Artificial Sequence: Synthetic primer
tgtgctcggcagtaggtaat

SEQ ID NO: 2778 - DNA, 20 bp, Artificial Sequence
  Description of Artificial Sequence: Synthetic primer
tggaggagggttaaggctat

SEQ ID NO: 2779 - DNA, 20 bp, Artificial Sequence
  Description of Artificial Sequence: Synthetic primer
caaccactcctccacatctc

SEQ ID NO: 2780 - DNA, 20 bp, Artificial Sequence
  Description of Artificial Sequence: Synthetic primer
ccccctctctttggttgtat

SEQ ID NO: 2781 - DNA, 20 bp, Artificial Sequence
  Description of Artificial Sequence: Synthetic primer
cgagctcatcttcgatcttc

SEQ ID NO: 2782 - DNA, 20 bp, Artificial Sequence
  Description of Artificial Sequence: Synthetic primer
acgtcgcttaaagacacagc

SEQ ID NO: 2783 - DNA, 20 bp, Artificial Sequence
  Description of Artificial Sequence: Synthetic primer
gtcatggtatcagagccttg

SEQ ID NO: 2784 - DNA, 20 bp, Artificial Sequence
  Description of Artificial Sequence: Synthetic primer
cctaccaccaccaccataaa

SEQ ID NO: 2785 - DNA, 20 bp, Artificial Sequence
  Description of Artificial Sequence: Synthetic primer
ccgacctaagcaaatcacac

SEQ ID NO: 2786 - DNA, 20 bp, Artificial Sequence
  Description of Artificial Sequence: Synthetic primer
cgttctagtacccctccctc

SEQ ID NO: 2787 - DNA, 20 bp, Artificial Sequence
  Description of Artificial Sequence: Synthetic primer
tcagagccttgaagacaacc

SEQ ID NO: 2788 - DNA, 20 bp, Artificial Sequence
  Description of Artificial Sequence: Synthetic primer
caggagtggtgatcaaaagg

SEQ ID NO: 2789 - DNA, 20 bp, Artificial Sequence
  Description of Artificial Sequence: Synthetic primer
acttgccgtatgtgtgtgtg

SEQ ID NO: 2790 - DNA, 20 bp, Artificial Sequence
  Description of Artificial Sequence: Synthetic primer
cacacccactagatccatcc

SEQ ID NO: 2791 - DNA, 20 bp, Artificial Sequence
  Description of Artificial Sequence: Synthetic primer
tcactctgggttctttcacc

SEQ ID NO: 2792 - DNA, 20 bp, Artificial Sequence
  Description of Artificial Sequence: Synthetic primer
tccctctctttaccaccctt

SEQ ID NO: 2793 - DNA, 20 bp, Artificial Sequence
  Description of Artificial Sequence: Synthetic primer
cctttcactccacacacaca

SEQ ID NO: 2794 - DNA, 20 bp, Artificial Sequence
  Description of Artificial Sequence: Synthetic primer
ggtgacaacaggaagtgagc

SEQ ID NO: 2795 - DNA, 20 bp, Artificial Sequence
  Description of Artificial Sequence: Synthetic primer
cagccagcagttaaccagat

SEQ ID NO: 2796 - DNA, 20 bp, Artificial Sequence
  Description of Artificial Sequence: Synthetic primer
acctgtcagaacaagccaag

SEQ ID NO: 2797 - DNA, 20 bp, Artificial Sequence
  Description of Artificial Sequence: Synthetic primer
cacagacagtcccaaatcct

SEQ ID NO: 2798 - DNA, 20 bp, Artificial Sequence
  Description of Artificial Sequence: Synthetic primer
cttccgatctagacgacgaa

SEQ ID NO: 2799 - DNA, 19 bp, Artificial Sequence
  Description of Artificial Sequence: Synthetic primer
gttgctgtcgaaaaccctg

SEQ ID NO: 2800 - DNA, 20 bp, Artificial Sequence
  Description of Artificial Sequence: Synthetic primer
actctacctccatgctgacg

SEQ ID NO: 2801 - DNA, 20 bp, Artificial Sequence
  Description of Artificial Sequence: Synthetic primer
gccctatgcttcactccata

SEQ ID NO: 2802 - DNA, 20 bp, Artificial Sequence
  Description of Artificial Sequence: Synthetic primer
gaagagaaagcagcagcgta

SEQ ID NO: 2803 - DNA, 20 bp, Artificial Sequence
  Description of Artificial Sequence: Synthetic primer
gaggctcagctcttccttct

SEQ ID NO: 2804 - DNA, 20 bp, Artificial Sequence
  Description of Artificial Sequence: Synthetic primer
actggtcttcgttgctgaag

SEQ ID NO: 2805 - DNA, 20 bp, Artificial Sequence
  Description of Artificial Sequence: Synthetic primer
ccctcaaaccaaatcactcc

SEQ ID NO: 2806 - DNA, 20 bp, Artificial Sequence
  Description of Artificial Sequence: Synthetic primer
ggagcaggagcatatgagaa

SEQ ID NO: 2807 - DNA, 20 bp, Artificial Sequence
  Description of Artificial Sequence: Synthetic primer
caaaggcagcagagaagaag

SEQ ID NO: 2808 - DNA, 20 bp, Artificial Sequence
  Description of Artificial Sequence: Synthetic primer
gcagcttagacccagtcaac

SEQ ID NO: 2809 - DNA, 20 bp, Artificial Sequence
  Description of Artificial Sequence: Synthetic primer
cctctccgagtcaaaacgta

SEQ ID NO: 2810 - DNA, 20 bp, Artificial Sequence
  Description of Artificial Sequence: Synthetic primer
atacagaggggtccgaaaac

SEQ ID NO: 2811 - DNA, 21 bp, Artificial Sequence
  Description of Artificial Sequence: Synthetic primer
cccttcatcctctctctcatc

SEQ ID NO: 2812 - DNA, 20 bp, Artificial Sequence
  Description of Artificial Sequence: Synthetic primer
cgtgtcaaaactacggctct

SEQ ID NO: 2813 - DNA, 20 bp, Artificial Sequence
  Description of Artificial Sequence: Synthetic primer
caggatcagaatcggatgac

SEQ ID NO: 2814 - DNA, 20 bp, Artificial Sequence
  Description of Artificial Sequence: Synthetic primer
gattagagcgtcatcggcta

SEQ ID NO: 2815 - DNA, 20 bp, Artificial Sequence
  Description of Artificial Sequence: Synthetic primer
gcatatccgatccaactcac

SEQ ID NO: 2816 - DNA, 20 bp, Artificial Sequence
  Description of Artificial Sequence: Synthetic primer
gtacacaatgggagcgtgtt

SEQ ID NO: 2817 - DNA, 20 bp, Artificial Sequence
  Description of Artificial Sequence: Synthetic primer
atctcttccaccactccctc

SEQ ID NO: 2818 - DNA, 19 bp, Artificial Sequence
  Description of Artificial Sequence: Synthetic primer
ggaagttaaagatccggcg

SEQ ID NO: 2819 - DNA, 20 bp, Artificial Sequence
  Description of Artificial Sequence: Synthetic primer
tctgactccatccagcctta

SEQ ID NO: 2820 - DNA, 18 bp, Artificial Sequence
  Description of Artificial Sequence: Synthetic primer
gaacccgcagcaatagaa

SEQ ID NO: 2821 - DNA, 20 bp, Artificial Sequence
  Description of Artificial Sequence: Synthetic primer
agagacgtcaacggaaacac

SEQ ID NO: 2822 - DNA, 20 bp, Artificial Sequence
  Description of Artificial Sequence: Synthetic primer
gattactcgttcaacggtcg

SEQ ID NO: 2823 - DNA, 20 bp, Artificial Sequence
  Description of Artificial Sequence: Synthetic primer
cagtgaaaagtgatgtcccc

SEQ ID NO: 2824 - DNA, 20 bp, Artificial Sequence
  Description of Artificial Sequence: Synthetic primer
cgttgacggaaggatatgac

SEQ ID NO: 2825 - DNA, 20 bp, Artificial Sequence
  Description of Artificial Sequence: Synthetic primer
gttctagcgtgtgatgcctt

SEQ ID NO: 2826 - DNA, 20 bp, Artificial Sequence
  Description of Artificial Sequence: Synthetic primer
ccattggctctccttcctat

SEQ ID NO: 2827 - DNA, 20 bp, Artificial Sequence
  Description of Artificial Sequence: Synthetic primer
cgatggtctccactaccaac

SEQ ID NO: 2828 - DNA, 18 bp, Artificial Sequence
  Description of Artificial Sequence: Synthetic primer
ctgggtacgctcgcatag

SEQ ID NO: 2829 - DNA, 20 bp, Artificial Sequence
  Description of Artificial Sequence: Synthetic primer
aacaggcagtcagacaccat

SEQ ID NO: 2830 - DNA, 20 bp, Artificial Sequence
  Description of Artificial Sequence: Synthetic primer
gtctccaatgaccaagatgc

SEQ ID NO: 2831 - DNA, 20 bp, Artificial Sequence
  Description of Artificial Sequence: Synthetic primer
gaggaggctgcagttgataa

SEQ ID NO: 2832 - DNA, 18 bp, Artificial Sequence
  Description of Artificial Sequence: Synthetic primer
ttcagtgtggttgtgcga

SEQ ID NO: 2833 - DNA, 20 bp, Artificial Sequence
  Description of Artificial Sequence: Synthetic primer
accggattatctccgatctc

SEQ ID NO: 2834 - DNA, 20 bp, Artificial Sequence
  Description of Artificial Sequence: Synthetic primer
cccacaccagttccttacac

SEQ ID NO: 2835 - DNA, 20 bp, Artificial Sequence
  Description of Artificial Sequence: Synthetic primer
gaggacatggtcggtgatag

SEQ ID NO: 2836 - DNA, 20 bp, Artificial Sequence
  Description of Artificial Sequence: Synthetic primer
ccctaggttttccgatcagt

SEQ ID NO: 2837 - DNA, 20 bp, Artificial Sequence
  Description of Artificial Sequence: Synthetic primer
ccgaacaacatcctgaacac

SEQ ID NO: 2838 - DNA, 20 bp, Artificial Sequence
  Description of Artificial Sequence: Synthetic primer
aaccgtcgtaacgatgactc

SEQ ID NO: 2839 - DNA, 20 bp, Artificial Sequence
  Description of Artificial Sequence: Synthetic primer
acgacatctggagattcacg

SEQ ID NO: 2840 - DNA, 20 bp, Artificial Sequence
  Description of Artificial Sequence: Synthetic primer
ggttaggcacgtttgacact

SEQ ID NO: 2841 - DNA, 20 bp, Artificial Sequence
  Description of Artificial Sequence: Synthetic primer
ccatgacagaagtcctccac

SEQ ID NO: 2842 - DNA, 19 bp, Artificial Sequence
  Description of Artificial Sequence: Synthetic primer
aaccctcctggatttggac

SEQ ID NO: 2843 - DNA, 20 bp, Artificial Sequence
  Description of Artificial Sequence: Synthetic primer
tcgttcgtctcttctgcttc

SEQ ID NO: 2844 - DNA, 20 bp, Artificial Sequence
  Description of Artificial Sequence: Synthetic primer
tctctgttggatacagggga

SEQ ID NO: 2845 - DNA, 20 bp, Artificial Sequence
  Description of Artificial Sequence: Synthetic primer
gtcgttgctgatactgcctt

SEQ ID NO: 2846 - DNA, 20 bp, Artificial Sequence
  Description of Artificial Sequence: Synthetic primer
ctgtctgggaacaaaacagc

SEQ ID NO: 2847 - DNA, 18 bp, Artificial Sequence
  Description of Artificial Sequence: Synthetic primer
ggtttgagttttccccca

SEQ ID NO: 2848 - DNA, 19 bp, Artificial Sequence
  Description of Artificial Sequence: Synthetic primer
cgttgctgtcgctctctaa

SEQ ID NO: 2849 - DNA, 20 bp, Artificial Sequence
  Description of Artificial Sequence: Synthetic primer
gagttcgaaccaaacaccac

SEQ ID NO: 2850 - DNA, 20 bp, Artificial Sequence
  Description of Artificial Sequence: Synthetic primer
gctgaagctgaccacacttt

SEQ ID NO: 2851 - DNA, 20 bp, Artificial Sequence
  Description of Artificial Sequence: Synthetic primer
gagcctgagaatgttgcagt

SEQ ID NO: 2852 - DNA, 20 bp, Artificial Sequence
  Description of Artificial Sequence: Synthetic primer
cagagctatcctcaatcgga

SEQ ID NO: 2853 - DNA, 20 bp, Artificial Sequence
  Description of Artificial Sequence: Synthetic primer
cctttcaggtgtctgcactt

SEQ ID NO: 2854 - DNA, 20 bp, Artificial Sequence
  Description of Artificial Sequence: Synthetic primer
cctgcactcagctccactat

SEQ ID NO: 2855 - DNA, 20 bp, Artificial Sequence
  Description of Artificial Sequence: Synthetic primer
cttactacgcctcagcatgg

SEQ ID NO: 2856 - DNA, 20 bp, Artificial Sequence
  Description of Artificial Sequence: Synthetic primer
caaacagacccaccagttgt

SEQ ID NO: 2857 - DNA, 18 bp, Artificial Sequence
  Description of Artificial Sequence: Synthetic primer
cggtcaatctttgcgttc

SEQ ID NO: 2858 - DNA, 20 bp, Artificial Sequence
  Description of Artificial Sequence: Synthetic primer
cctctacacttgctaaccgc

SEQ ID NO: 2859 - DNA, 20 bp, Artificial Sequence
  Description of Artificial Sequence: Synthetic primer
atcctcctcctcatctgacc

SEQ ID NO: 2860 - DNA, 20 bp, Artificial Sequence
  Description of Artificial Sequence: Synthetic primer
tattcgagagtcgttgagcc

SEQ ID NO: 2861 - DNA, 20 bp, Artificial Sequence
  Description of Artificial Sequence: Synthetic primer
cttcttcctcttcacacacg

SEQ ID NO: 2862 - DNA, 20 bp, Artificial Sequence
  Description of Artificial Sequence: Synthetic primer
cacgccttctacgagacatt

SEQ ID NO: 2863 - DNA, 21 bp, Artificial Sequence
  Description of Artificial Sequence: Synthetic primer
cccaactaaccaccttctctc

SEQ ID NO: 2864 - DNA, 20 bp, Artificial Sequence
  Description of Artificial Sequence: Synthetic primer
cgacttaacccctggttagc

SEQ ID NO: 2865 - DNA, 20 bp, Artificial Sequence
  Description of Artificial Sequence: Synthetic primer
ccacccaaccaatgtcttac

SEQ ID NO: 2866 - DNA, 20 bp, Artificial Sequence
  Description of Artificial Sequence: Synthetic primer
cacctattctcgcacacaca

SEQ ID NO: 2867 - DNA, 20 bp, Artificial Sequence
  Description of Artificial Sequence: Synthetic primer
ctggtggtataacggaggtg

SEQ ID NO: 2868 - DNA, 20 bp, Artificial Sequence
  Description of Artificial Sequence: Synthetic primer
catccgtaacaccaccaaga

SEQ ID NO: 2869 - DNA, 20 bp, Artificial Sequence
  Description of Artificial Sequence: Synthetic primer
attccgagagagtttggacc

SEQ ID NO: 2870 - DNA, 20 bp, Artificial Sequence
  Description of Artificial Sequence: Synthetic primer
tacccacagtggcttcaact

SEQ ID NO: 2871 - DNA, 20 bp, Artificial Sequence
  Description of Artificial Sequence: Synthetic primer
cgatccccctttctcatatc

SEQ ID NO: 2872 - DNA, 20 bp, Artificial Sequence
  Description of Artificial Sequence: Synthetic primer
cctacgctttctctcatcca

SEQ ID NO: 2873 - DNA, 20 bp, Artificial Sequence
  Description of Artificial Sequence: Synthetic primer
gaggttctgatcgtgaatgg

SEQ ID NO: 2874 - DNA, 20 bp, Artificial Sequence
  Description of Artificial Sequence: Synthetic primer
tcaccttcatacccaccagt

SEQ ID NO: 2875 - DNA, 20 bp, Artificial Sequence
  Description of Artificial Sequence: Synthetic primer
ataaaccctcaacccactcc

SEQ ID NO: 2876 - DNA, 20 bp, Artificial Sequence
  Description of Artificial Sequence: Synthetic primer
tcccaggaggttcctaaatc

SEQ ID NO: 2877 - DNA, 20 bp, Artificial Sequence
  Description of Artificial Sequence: Synthetic primer
gcgttaatccgttccctatg

SEQ ID NO: 2878 - DNA, 20 bp, Artificial Sequence
  Description of Artificial Sequence: Synthetic primer
gcactgcgtcaccttacttt

SEQ ID NO: 2879 - DNA, 20 bp, Artificial Sequence
  Description of Artificial Sequence: Synthetic primer
agaagaactcgaagaagccc

SEQ ID NO: 2880 - DNA, 20 bp, Artificial Sequence
  Description of Artificial Sequence: Synthetic primer
actgtgctgagaatgggtgt

SEQ ID NO: 2881 - DNA, 20 bp, Artificial Sequence
  Description of Artificial Sequence: Synthetic primer
catctccgatcgatggtaac

SEQ ID NO: 2882 - DNA, 20 bp, Artificial Sequence
  Description of Artificial Sequence: Synthetic primer
ccccagaccctaccaataac

SEQ ID NO: 2883 - DNA, 20 bp, Artificial Sequence
  Description of Artificial Sequence: Synthetic primer
ccccagaccctaccaataac

SEQ ID NO: 2884 - DNA, 20 bp, Artificial Sequence
  Description of Artificial Sequence: Synthetic primer
caagtaccgttcttcaagcg

SEQ ID NO: 2885 - DNA, 20 bp, Artificial Sequence
  Description of Artificial Sequence: Synthetic primer
cgcctctccaaacctctatt

SEQ ID NO: 2886 - DNA, 20 bp, Artificial Sequence
  Description of Artificial Sequence: Synthetic primer
gttcgttcgtccatcgtatc

SEQ ID NO: 2887 - DNA, 19 bp, Artificial Sequence
  Description of Artificial Sequence: Synthetic primer
gctacactttttgcacggg

SEQ ID NO: 2888 - DNA, 20 bp, Artificial Sequence
  Description of Artificial Sequence: Synthetic primer
agggttctacacaaacaccg

SEQ ID NO: 2889 - DNA, 20 bp, Artificial Sequence
  Description of Artificial Sequence: Synthetic primer
aggctatgaagctcctggat

SEQ ID NO: 2890 - DNA, 20 bp, Artificial Sequence
  Description of Artificial Sequence: Synthetic primer
acgaagacgactcagcaaac

SEQ ID NO: 2891 - DNA, 20 bp, Artificial Sequence
  Description of Artificial Sequence: Synthetic primer
ccccactttgctacattacg

SEQ ID NO: 2892 - DNA, 20 bp, Artificial Sequence
  Description of Artificial Sequence: Synthetic primer
tgctgtcccttagttcttgc

SEQ ID NO: 2893 - DNA, 20 bp, Artificial Sequence
  Description of Artificial Sequence: Synthetic primer
aaccctaactcgatcaaccc

SEQ ID NO: 2894 - DNA, 20 bp, Artificial Sequence
  Description of Artificial Sequence: Synthetic primer
gggaaacgagtcccctaata

SEQ ID NO: 2895 - DNA, 20 bp, Artificial Sequence
  Description of Artificial Sequence: Synthetic primer
accgttcacctctctccttc

SEQ ID NO: 2896 - DNA, 20 bp, Artificial Sequence
  Description of Artificial Sequence: Synthetic primer
ggggacataccatcacagaa

SEQ ID NO: 2897 - DNA, 20 bp, Artificial Sequence
  Description of Artificial Sequence: Synthetic primer
catcttgaggcttggtctgt

SEQ ID NO: 2898 - DNA, 20 bp, Artificial Sequence
  Description of Artificial Sequence: Synthetic primer
gttcaagcagctccaacagt

SEQ ID NO: 2899 - DNA, 20 bp, Artificial Sequence
  Description of Artificial Sequence: Synthetic primer
gttcgggtacggtaaaacct

SEQ ID NO: 2900 - DNA, 20 bp, Artificial Sequence
  Description of Artificial Sequence: Synthetic primer
cacacccctctgatgaaatc

SEQ ID NO: 2901 - DNA, 20 bp, Artificial Sequence
  Description of Artificial Sequence: Synthetic primer
cagaaaccacccaactcaag

SEQ ID NO: 2902 - DNA, 20 bp, Artificial Sequence
  Description of Artificial Sequence: Synthetic primer
gtgaagttgcagcagttcct

SEQ ID NO: 2903 - DNA, 18 bp, Artificial Sequence
  Description of Artificial Sequence: Synthetic primer
ctcatcccttcaaaaccc

SEQ ID NO: 2904 - DNA, 20 bp, Artificial Sequence
  Description of Artificial Sequence: Synthetic primer
ttaaggtggctatggagcag

SEQ ID NO: 2905 - DNA, 20 bp, Artificial Sequence
  Description of Artificial Sequence: Synthetic primer
cgcgtaccgtattacaacct

SEQ ID NO: 2906 - DNA, 20 bp, Artificial Sequence
  Description of Artificial Sequence: Synthetic primer
tgctccgtctaagaaagctc

SEQ ID NO: 2907 - DNA, 20 bp, Artificial Sequence
  Description of Artificial Sequence: Synthetic primer
gtacggagcttttggagtca

SEQ ID NO: 2908 - DNA, 19 bp, Artificial Sequence
  Description of Artificial Sequence: Synthetic primer
ctacacttttccccgggtt

SEQ ID NO: 2909 - DNA, 18 bp, Artificial Sequence
  Description of Artificial Sequence: Synthetic primer
gcgatccaacaaaccatc

SEQ ID NO: 2910 - DNA, 20 bp, Artificial Sequence
  Description of Artificial Sequence: Synthetic primer
cgatgggagttctctaacga

SEQ ID NO: 2911 - DNA, 19 bp, Artificial Sequence
  Description of Artificial Sequence: Synthetic primer
gataagatccgccgtcaac

SEQ ID NO: 2912 - DNA, 18 bp, Artificial Sequence
  Description of Artificial Sequence: Synthetic primer
tcaccccaaaacgatgtc

SEQ ID NO: 2913 - DNA, 20 bp, Artificial Sequence
  Description of Artificial Sequence: Synthetic primer
cctaaccccacctcttgttt

SEQ ID NO: 2914 - DNA, 19 bp, Artificial Sequence
  Description of Artificial Sequence: Synthetic primer
tctaccgacaaccaaaccc

SEQ ID NO: 2915 - DNA, 20 bp, Artificial Sequence
  Description of Artificial Sequence: Synthetic primer
gcacacacacagacaccaat

SEQ ID NO: 2916 - DNA, 20 bp, Artificial Sequence
  Description of Artificial Sequence: Synthetic primer
cctcccctgtcttttcctta

SEQ ID NO: 2917 - DNA, 20 bp, Artificial Sequence
  Description of Artificial Sequence: Synthetic primer
ttaaggaggcgatagtgacg

SEQ ID NO: 2918 - DNA, 20 bp, Artificial Sequence
  Description of Artificial Sequence: Synthetic primer
actgccaccaataacaccac

SEQ ID NO: 2919 - DNA, 20 bp, Artificial Sequence
  Description of Artificial Sequence: Synthetic primer
gtaggggtgttcatttgtgg

SEQ ID NO: 2920 - DNA, 20 bp, Artificial Sequence
  Description of Artificial Sequence: Synthetic primer
aggtccaacccttggataag

SEQ ID NO: 2921 - DNA, 20 bp, Artificial Sequence
  Description of Artificial Sequence: Synthetic primer
cgttgcagaagctagaaagg

SEQ ID NO: 2922 - DNA, 20 bp, Artificial Sequence
  Description of Artificial Sequence: Synthetic primer
gtgtcgttttgtagatcgcc

SEQ ID NO: 2923 - DNA, 20 bp, Artificial Sequence
  Description of Artificial Sequence: Synthetic primer
cgagtgtccaggataacgat

SEQ ID NO: 2924 - DNA, 20 bp, Artificial Sequence
  Description of Artificial Sequence: Synthetic primer
gtttccaacactcaacccac

SEQ ID NO: 2925 - DNA, 20 bp, Artificial Sequence
  Description of Artificial Sequence: Synthetic primer
gtttccaacactcaacccac

SEQ ID NO: 2926 - DNA, 20 bp, Artificial Sequence
  Description of Artificial Sequence: Synthetic primer
ctggtaaaaagggttctcgg

SEQ ID NO: 2927 - DNA, 18 bp, Artificial Sequence
  Description of Artificial Sequence: Synthetic primer
caaagacccacaagccaa

SEQ ID NO: 2928 - DNA, 20 bp, Artificial Sequence
  Description of Artificial Sequence: Synthetic primer
gtgttcacaggtcccgttag

SEQ ID NO: 2929 - DNA, 20 bp, Artificial Sequence
  Description of Artificial Sequence: Synthetic primer
ccatctccagcatcctaatg

SEQ ID NO: 2930 - DNA, 20 bp, Artificial Sequence
  Description of Artificial Sequence: Synthetic primer
gtgtagggttgcagaggtgt

SEQ ID NO: 2931 - DNA, 20 bp, Artificial Sequence
  Description of Artificial Sequence: Synthetic primer
gaatatgggagcagttggtg

SEQ ID NO: 2932 - DNA, 20 bp, Artificial Sequence
  Description of Artificial Sequence: Synthetic primer
aggaggtcatgaaagaaggg

SEQ ID NO: 2933 - DNA, 21 bp, Artificial Sequence
  Description of Artificial Sequence: Synthetic primer
ccacacttaactccacgtgtc

SEQ ID NO: 2934 - DNA, 20 bp, Artificial Sequence
  Description of Artificial Sequence: Synthetic primer
atcctttcggatagtcaccc

SEQ ID NO: 2935 - DNA, 20 bp, Artificial Sequence
  Description of Artificial Sequence: Synthetic primer
gtgtgaaccttcacggactc

SEQ ID NO: 2936 - DNA, 20 bp, Artificial Sequence
  Description of Artificial Sequence: Synthetic primer
caaagggagaaggggatatg

SEQ ID NO: 2937 - DNA, 20 bp, Artificial Sequence
  Description of Artificial Sequence: Synthetic primer
tggaacagatgtcgggtagt

SEQ ID NO: 2938 - DNA, 20 bp, Artificial Sequence
  Description of Artificial Sequence: Synthetic primer
gatcaaatatggagaccgcc

SEQ ID NO: 2939 - DNA, 20 bp, Artificial Sequence
  Description of Artificial Sequence: Synthetic primer
cagtcgccagttattcaacc

SEQ ID NO: 2940 - DNA, 20 bp, Artificial Sequence
  Description of Artificial Sequence: Synthetic primer
cttcatcgtccgtaccaaca

SEQ ID NO: 2941 - DNA, 20 bp, Artificial Sequence
  Description of Artificial Sequence: Synthetic primer
cggcgagagagagacagtag

SEQ ID NO: 2942 - DNA, 20 bp, Artificial Sequence
  Description of Artificial Sequence: Synthetic primer
gtctccgtcaacgtcatctc

SEQ ID NO: 2943 - DNA, 20 bp, Artificial Sequence
  Description of Artificial Sequence: Synthetic primer
gggactgatattgtggttgc

SEQ ID NO: 2944 - DNA, 20 bp, Artificial Sequence
  Description of Artificial Sequence: Synthetic primer
accgtcctatctccatctcc

SEQ ID NO: 2945 - DNA, 20 bp, Artificial Sequence
  Description of Artificial Sequence: Synthetic primer
tgtgctgctcatagaacctg

SEQ ID NO: 2946 - DNA, 20 bp, Artificial Sequence
  Description of Artificial Sequence: Synthetic primer
gggctcgaatcatagagtca

SEQ ID NO: 2947 - DNA, 20 bp, Artificial Sequence
  Description of Artificial Sequence: Synthetic primer
ctccgtcataacactccgtc

SEQ ID NO: 2948 - DNA, 19 bp, Artificial Sequence
  Description of Artificial Sequence: Synthetic primer
gtcttctacgttctccggc

SEQ ID NO: 2949 - DNA, 18 bp, Artificial Sequence
  Description of Artificial Sequence: Synthetic primer
ggggatttgcagttggat

SEQ ID NO: 2950 - DNA, 20 bp, Artificial Sequence
  Description of Artificial Sequence: Synthetic primer
ctctgcaacatctaggcagc

SEQ ID NO: 2951 - DNA, 20 bp, Artificial Sequence
  Description of Artificial Sequence: Synthetic primer
catcaccttcttcatcccac

SEQ ID NO: 2952 - DNA, 20 bp, Artificial Sequence
  Description of Artificial Sequence: Synthetic primer
gctaccgtttcgtacaacca

SEQ ID NO: 2953 - DNA, 20 bp, Artificial Sequence
  Description of Artificial Sequence: Synthetic primer
ggtatggagcgtactccgtt

SEQ ID NO: 2954 - DNA, 20 bp, Artificial Sequence
  Description of Artificial Sequence: Synthetic primer
agtcgatcatgtcttgctgc

SEQ ID NO: 2955 - DNA, 20 bp, Artificial Sequence
  Description of Artificial Sequence: Synthetic primer
gtcacggttcaggaaacatc

SEQ ID NO: 2956 - DNA, 20 bp, Artificial Sequence
  Description of Artificial Sequence: Synthetic primer
cgctcattcaatctagcctc

SEQ ID NO: 2957 - DNA, 20 bp, Artificial Sequence
  Description of Artificial Sequence: Synthetic primer
ctcaacaggctgcttatggt

SEQ ID NO: 2958 - DNA, 20 bp, Artificial Sequence
  Description of Artificial Sequence: Synthetic primer
ttgccctctggtgtttagtc

SEQ ID NO: 2959 - DNA, 20 bp, Artificial Sequence
  Description of Artificial Sequence: Synthetic primer
tcagggtaaaccttactgcg

SEQ ID NO: 2960 - DNA, 20 bp, Artificial Sequence
  Description of Artificial Sequence: Synthetic primer
ggatgttggctgactttacg

SEQ ID NO: 2961 - DNA, 20 bp, Artificial Sequence
  Description of Artificial Sequence: Synthetic primer
gaacggtggatacaatcagc

SEQ ID NO: 2962 - DNA, 20 bp, Artificial Sequence
  Description of Artificial Sequence: Synthetic primer
cgaaggtgatcgagaagatg

SEQ ID NO: 2963 - DNA, 20 bp, Artificial Sequence
  Description of Artificial Sequence: Synthetic primer
gggagatagagtttaggcgg

SEQ ID NO: 2964 - DNA, 20 bp, Artificial Sequence
  Description of Artificial Sequence: Synthetic primer
agggtttcagtttcacccac

SEQ ID NO: 2965 - DNA, 20 bp, Artificial Sequence
  Description of Artificial Sequence: Synthetic primer
caagccatgaagtctcgtct

SEQ ID NO: 2966 - DNA, 19 bp, Artificial Sequence
  Description of Artificial Sequence: Synthetic primer
cagccaccaatacctttcc

SEQ ID NO: 2967 - DNA, 20 bp, Artificial Sequence
  Description of Artificial Sequence: Synthetic primer
tagaaccacttaaccaccgc

SEQ ID NO: 2968 - DNA, 20 bp, Artificial Sequence
  Description of Artificial Sequence: Synthetic primer
ggtgatgttgaagacccatc

SEQ ID NO: 2969 - DNA, 20 bp, Artificial Sequence
  Description of Artificial Sequence: Synthetic primer
ccaaggattgttaccgtgag

SEQ ID NO: 2970 - DNA, 20 bp, Artificial Sequence
  Description of Artificial Sequence: Synthetic primer
agcagccatggtagcaatag

SEQ ID NO: 2971 - DNA, 20 bp, Artificial Sequence
  Description of Artificial Sequence: Synthetic primer
tgaacctactacccctgcaa

SEQ ID NO: 2972 - DNA, 19 bp, Artificial Sequence
  Description of Artificial Sequence: Synthetic primer
tgtcggcctctgtttctct

SEQ ID NO: 2973 - DNA, 20 bp, Artificial Sequence
  Description of Artificial Sequence: Synthetic primer
cacctagtcaacgccttttc

SEQ ID NO: 2974 - DNA, 19 bp, Artificial Sequence
  Description of Artificial Sequence: Synthetic primer
gcagccgtaaagcaaccta

SEQ ID NO: 2975 - DNA, 20 bp, Artificial Sequence
  Description of Artificial Sequence: Synthetic primer
gaacctcccattggtctctc

SEQ ID NO: 2976 - DNA, 20 bp, Artificial Sequence
  Description of Artificial Sequence: Synthetic primer
cagttacagcaggggaagaa

SEQ ID NO: 2977 - DNA, 20 bp, Artificial Sequence
  Description of Artificial Sequence: Synthetic primer
cggtttccgtaaccctagat

SEQ ID NO: 2978 - DNA, 20 bp, Artificial Sequence
  Description of Artificial Sequence: Synthetic primer
gaacaacaacagcagcaagg

SEQ ID NO: 2979 - DNA, 20 bp, Artificial Sequence
  Description of Artificial Sequence: Synthetic primer
cgagaagaaggctgtagctg

SEQ ID NO: 2980 - DNA, 20 bp, Artificial Sequence
  Description of Artificial Sequence: Synthetic primer
cgttattctcatccacgtcc

SEQ ID NO: 2981 - DNA, 20 bp, Artificial Sequence
  Description of Artificial Sequence: Synthetic primer
gggtcaattctaccggattc

SEQ ID NO: 2982 - DNA, 20 bp, Artificial Sequence
  Description of Artificial Sequence: Synthetic primer
atcctcaacacccacaacac

SEQ ID NO: 2983 - DNA, 20 bp, Artificial Sequence
  Description of Artificial Sequence: Synthetic primer
ccacaaccagaaaccctaac

SEQ ID NO: 2984 - DNA, 20 bp, Artificial Sequence
  Description of Artificial Sequence: Synthetic primer
gatctaatccgcactcatcg

SEQ ID NO: 2985 - DNA, 20 bp, Artificial Sequence
  Description of Artificial Sequence: Synthetic primer
aacccaaccctagatccaac

SEQ ID NO: 2986 - DNA, 20 bp, Artificial Sequence
  Description of Artificial Sequence: Synthetic primer
atcaccccaactctcctctc

SEQ ID NO: 2987 - DNA, 20 bp, Artificial Sequence
  Description of Artificial Sequence: Synthetic primer
gtggcaatgagtaagatggg

SEQ ID NO: 2988 - DNA, 20 bp, Artificial Sequence
  Description of Artificial Sequence: Synthetic primer
cccactttgactcattgacc

SEQ ID NO: 2989 - DNA, 20 bp, Artificial Sequence
  Description of Artificial Sequence: Synthetic primer
agagaccgtggggaaaatac

SEQ ID NO: 2990 - DNA, 20 bp, Artificial Sequence
  Description of Artificial Sequence: Synthetic primer
actggtcttcgttgctgaag

SEQ ID NO: 2991 - DNA, 20 bp, Artificial Sequence
  Description of Artificial Sequence: Synthetic primer
aaccatagatccctcatccc

SEQ ID NO: 2992 - DNA, 20 bp, Artificial Sequence
  Description of Artificial Sequence: Synthetic primer
gctcagcggcttacatagag

SEQ ID NO: 2993 - DNA, 20 bp, Artificial Sequence
  Description of Artificial Sequence: Synthetic primer
acaccttcaaagcctcctct

SEQ ID NO: 2994 - DNA, 20 bp, Artificial Sequence
  Description of Artificial Sequence: Synthetic primer
ccacctgccaaagtgaatag

SEQ ID NO: 2995 - DNA, 20 bp, Artificial Sequence
  Description of Artificial Sequence: Synthetic primer
aacttggtggaggaagaacc

SEQ ID NO: 2996 - DNA, 20 bp, Artificial Sequence
  Description of Artificial Sequence: Synthetic primer
aatgaccaagagaccccttc

SEQ ID NO: 2997 - DNA, 19 bp, Artificial Sequence
  Description of Artificial Sequence: Synthetic primer
accctcttcaacatcaccg

SEQ ID NO: 2998 - DNA, 20 bp, Artificial Sequence
  Description of Artificial Sequence: Synthetic primer
tgctgctctgctatgtatcg

SEQ ID NO: 2999 - DNA, 20 bp, Artificial Sequence
  Description of Artificial Sequence: Synthetic primer
gagttctggtccaacgtgtc

SEQ ID NO: 3000 - DNA, 20 bp, Artificial Sequence
  Description of Artificial Sequence: Synthetic primer
aacgaacaagcaccactacc

SEQ ID NO: 3001 - DNA, 20 bp, Artificial Sequence
  Description of Artificial Sequence: Synthetic primer
gcaggttgtagggttagggt

SEQ ID NO: 3002 - DNA, 20 bp, Artificial Sequence
  Description of Artificial Sequence: Synthetic primer
gtgtttcaacctctgatggg

SEQ ID NO: 3003 - DNA, 20 bp, Artificial Sequence
  Description of Artificial Sequence: Synthetic primer
agtctccaccaccactacca

SEQ ID NO: 3004 - DNA, 20 bp, Artificial Sequence
  Description of Artificial Sequence: Synthetic primer
caggttgttactcagcggtt

SEQ ID NO: 3005 - DNA, 20 bp, Artificial Sequence
  Description of Artificial Sequence: Synthetic primer
ctccattcagtcctccacac

SEQ ID NO: 3006 - DNA, 20 bp, Artificial Sequence
  Description of Artificial Sequence: Synthetic primer
ggatgatgagctggtaatgg

SEQ ID NO: 3007 - DNA, 20 bp, Artificial Sequence
  Description of Artificial Sequence: Synthetic primer
ggtaactccaaatcctccgt

SEQ ID NO: 3008 - DNA, 23 bp, Artificial Sequence
  Description of Artificial Sequence: Synthetic primer
gacatatctctacccctacaggc

SEQ ID NO: 3009 - DNA, 20 bp, Artificial Sequence
  Description of Artificial Sequence: Synthetic primer
cactttatggacagcagcct

SEQ ID NO: 3010 - DNA, 20 bp, Artificial Sequence
  Description of Artificial Sequence: Synthetic primer
cactcccaattacttcccct

SEQ ID NO: 3011 - DNA, 19 bp, Artificial Sequence
  Description of Artificial Sequence: Synthetic primer
aaacactcctccggtcaac

SEQ ID NO: 3012 - DNA, 20 bp, Artificial Sequence
  Description of Artificial Sequence: Synthetic primer
cacaggggtggagtcaatag

SEQ ID NO: 3013 - DNA, 19 bp, Artificial Sequence
  Description of Artificial Sequence: Synthetic primer
tctccgtgtcatcaagacg

SEQ ID NO: 3014 - DNA, 20 bp, Artificial Sequence
  Description of Artificial Sequence: Synthetic primer
ctcccacaatctccttcctt

SEQ ID NO: 3015 - DNA, 20 bp, Artificial Sequence
  Description of Artificial Sequence: Synthetic primer
ggtttgaagacagaggggat

SEQ ID NO: 3016 - DNA, 20 bp, Artificial Sequence
  Description of Artificial Sequence: Synthetic primer
caagacgaatcccgtagaga

SEQ ID NO: 3017 - DNA, 20 bp, Artificial Sequence
  Description of Artificial Sequence: Synthetic primer
gaaaaaccagcagcagtagc

SEQ ID NO: 3018 - DNA, 20 bp, Artificial Sequence
  Description of Artificial Sequence: Synthetic primer
catgtggggtggtttacaag

SEQ ID NO: 3019 - DNA, 20 bp, Artificial Sequence
  Description of Artificial Sequence: Synthetic primer
ggtaaacgacctggtaagca

SEQ ID NO: 3020 - DNA, 20 bp, Artificial Sequence
  Description of Artificial Sequence: Synthetic primer
cggtaacggaaacagtaacg

SEQ ID NO: 3021 - DNA, 19 bp, Artificial Sequence
  Description of Artificial Sequence: Synthetic primer
ctttcatcacagcgcacac

SEQ ID NO: 3022 - DNA, 20 bp, Artificial Sequence
  Description of Artificial Sequence: Synthetic primer
ctcgtctgaaacaaccaacc

SEQ ID NO: 3023 - DNA, 20 bp, Artificial Sequence
  Description of Artificial Sequence: Synthetic primer
taggtcgttatctcacccca

SEQ ID NO: 3024 - DNA, 20 bp, Artificial Sequence
  Description of Artificial Sequence: Synthetic primer
agagcaatcacagttggagc

SEQ ID NO: 3025 - DNA, 20 bp, Artificial Sequence
  Description of Artificial Sequence: Synthetic primer
caatcgcacgagaaactagc

SEQ ID NO: 3026 - DNA, 20 bp, Artificial Sequence
  Description of Artificial Sequence: Synthetic primer
ctttctgtcatccccagttg

SEQ ID NO: 3027 - DNA, 20 bp, Artificial Sequence
  Description of Artificial Sequence: Synthetic primer
agccaacaccccctatattc

SEQ ID NO: 3028 - DNA, 20 bp, Artificial Sequence
  Description of Artificial Sequence: Synthetic primer
cacttacaacatgctacgcc

SEQ ID NO: 3029 - DNA, 20 bp, Artificial Sequence
  Description of Artificial Sequence: Synthetic primer
tgtcctcttcaacggagttc

SEQ ID NO: 3030 - DNA, 20 bp, Artificial Sequence
  Description of Artificial Sequence: Synthetic primer
ttcacacgtgtcttcagctc

SEQ ID NO: 3031 - DNA, 20 bp, Artificial Sequence
  Description of Artificial Sequence: Synthetic primer
gtggtcatgatccctttgac

SEQ ID NO: 3032 - DNA, 20 bp, Artificial Sequence
  Description of Artificial Sequence: Synthetic primer
cccagttgaattctgctctc

SEQ ID NO: 3033 - DNA, 20 bp, Artificial Sequence
  Description of Artificial Sequence: Synthetic primer
cacttgcagaacctatggct

SEQ ID NO: 3034 - DNA, 20 bp, Artificial Sequence
  Description of Artificial Sequence: Synthetic primer
agctccagcttcacaacatc

SEQ ID NO: 3035 - DNA, 20 bp, Artificial Sequence
  Description of Artificial Sequence: Synthetic primer
tctctcctcaccaactcacc

SEQ ID NO: 3036 - DNA, 20 bp, Artificial Sequence
  Description of Artificial Sequence: Synthetic primer
gctctctcttcccttcatcc

SEQ ID NO: 3037 - DNA, 20 bp, Artificial Sequence
  Description of Artificial Sequence: Synthetic primer
gctctctcttcccttcatcc

SEQ ID NO: 3038 - DNA, 20 bp, Artificial Sequence
  Description of Artificial Sequence: Synthetic primer
tacaagacgaatcccgtagc

SEQ ID NO: 3039 - DNA, 20 bp, Artificial Sequence
  Description of Artificial Sequence: Synthetic primer
gtccatcttcttcctcacca

SEQ ID NO: 3040 - DNA, 18 bp, Artificial Sequence
  Description of Artificial Sequence: Synthetic primer
gcaggagcaaagaagcaa

SEQ ID NO: 3041 - DNA, 20 bp, Artificial Sequence
  Description of Artificial Sequence: Synthetic primer
tgactgggatgctaagaagc

SEQ ID NO: 3042 - DNA, 20 bp, Artificial Sequence
  Description of Artificial Sequence: Synthetic primer
atctcaacagcgataggctc

SEQ ID NO: 3043 - DNA, 20 bp, Artificial Sequence
  Description of Artificial Sequence: Synthetic primer
tcacctcaccacctcttcat

SEQ ID NO: 3044 - DNA, 20 bp, Artificial Sequence
  Description of Artificial Sequence: Synthetic primer
acctccgttatgcagtcttc

SEQ ID NO: 3045 - DNA, 19 bp, Artificial Sequence
  Description of Artificial Sequence: Synthetic primer
gagttttgatccccggact

SEQ ID NO: 3046 - DNA, 22 bp, Artificial Sequence
  Description of Artificial Sequence: Synthetic primer
gagtctggtgttgaaactaggg

SEQ ID NO: 3047 - DNA, 20 bp, Artificial Sequence
  Description of Artificial Sequence: Synthetic primer
tgctgtcgctagggttagag

SEQ ID NO: 3048 - DNA, 20 bp, Artificial Sequence
  Description of Artificial Sequence: Synthetic primer
gtcgctagggcttacaatca

SEQ ID NO: 3049 - DNA, 20 bp, Artificial Sequence
  Description of Artificial Sequence: Synthetic primer
aagtcgcttgaaggagaggt

SEQ ID NO: 3050 - DNA, 20 bp, Artificial Sequence
  Description of Artificial Sequence: Synthetic primer
acctcttgaactccgacctc

SEQ ID NO: 3051 - DNA, 20 bp, Artificial Sequence
  Description of Artificial Sequence: Synthetic primer
aacgtaagaccctcctctcc

SEQ ID NO: 3052 - DNA, 20 bp, Artificial Sequence
  Description of Artificial Sequence: Synthetic primer
accttattcggagcctcagt

SEQ ID NO: 3053 - DNA, 20 bp, Artificial Sequence
  Description of Artificial Sequence: Synthetic primer
cactacctctcccacttcca

SEQ ID NO: 3054 - DNA, 20 bp, Artificial Sequence
  Description of Artificial Sequence: Synthetic primer
aggttagctcttagggctcg

SEQ ID NO: 3055 - DNA, 20 bp, Artificial Sequence
  Description of Artificial Sequence: Synthetic primer
tttagagtcgtggaccaagg

SEQ ID NO: 3056 - DNA, 20 bp, Artificial Sequence
  Description of Artificial Sequence: Synthetic primer
ccgtttctaatcacctccct

SEQ ID NO: 3057 - DNA, 20 bp, Artificial Sequence
  Description of Artificial Sequence: Synthetic primer
agggttccagtgggacttac

SEQ ID NO: 3058 - DNA, 20 bp, Artificial Sequence
  Description of Artificial Sequence: Synthetic primer
taacctcacactcacagcga

SEQ ID NO: 3059 - DNA, 20 bp, Artificial Sequence
  Description of Artificial Sequence: Synthetic primer
taggcgttttcctctgtgtc

SEQ ID NO: 3060 - DNA, 20 bp, Artificial Sequence
  Description of Artificial Sequence: Synthetic primer
acgcacccatcagtacaact

SEQ ID NO: 3061 - DNA, 20 bp, Artificial Sequence
  Description of Artificial Sequence: Synthetic primer
gagtgagaaagccgtgtcat

SEQ ID NO: 3062 - DNA, 20 bp, Artificial Sequence
  Description of Artificial Sequence: Synthetic primer
ccctactcacatcaaaacgg

SEQ ID NO: 3063 - DNA, 20 bp, Artificial Sequence
  Description of Artificial Sequence: Synthetic primer
tgtcgcctctcattctaagg

SEQ ID NO: 3064 - DNA, 20 bp, Artificial Sequence
  Description of Artificial Sequence: Synthetic primer
aagtacaactccacaaccgc

SEQ ID NO: 3065 - DNA, 18 bp, Artificial Sequence
  Description of Artificial Sequence: Synthetic primer
ccaatcgatgcttcacct

SEQ ID NO: 3066 - DNA, 20 bp, Artificial Sequence
  Description of Artificial Sequence: Synthetic primer
attctctgggaatgagggac

SEQ ID NO: 3067 - DNA, 20 bp, Artificial Sequence
  Description of Artificial Sequence: Synthetic primer
gaagaagcgagggtcataca

SEQ ID NO: 3068 - DNA, 20 bp, Artificial Sequence
  Description of Artificial Sequence: Synthetic primer
agaaggtcgctgaagaggat

SEQ ID NO: 3069 - DNA, 20 bp, Artificial Sequence
  Description of Artificial Sequence: Synthetic primer
gaaactggaggaagaggagg

SEQ ID NO: 3070 - DNA, 20 bp, Artificial Sequence
  Description of Artificial Sequence: Synthetic primer
agcggtgagatgtgaaagac

SEQ ID NO: 3071 - DNA, 20 bp, Artificial Sequence
  Description of Artificial Sequence: Synthetic primer
gcactagtcttccctcacca

SEQ ID NO: 3072 - DNA, 20 bp, Artificial Sequence
  Description of Artificial Sequence: Synthetic primer
cactgctcatccttccaagt

SEQ ID NO: 3073 - DNA, 18 bp, Artificial Sequence
  Description of Artificial Sequence: Synthetic primer
gttgtgaggacggtggtg

SEQ ID NO: 3074 - DNA, 20 bp, Artificial Sequence
  Description of Artificial Sequence: Synthetic primer
catatacccaacccaacacc

SEQ ID NO: 3075 - DNA, 20 bp, Artificial Sequence
  Description of Artificial Sequence: Synthetic primer
ggaaggagggattcaagaag

SEQ ID NO: 3076 - DNA, 20 bp, Artificial Sequence
  Description of Artificial Sequence: Synthetic primer
gccccttcttcgatttagag

SEQ ID NO: 3077 - DNA, 18 bp, Artificial Sequence
  Description of Artificial Sequence: Synthetic primer
cccaatttgtttcacccc

SEQ ID NO: 3078 - DNA, 20 bp, Artificial Sequence
  Description of Artificial Sequence: Synthetic primer
gccacacactcaaattctcc

SEQ ID NO: 3079 - DNA, 19 bp, Artificial Sequence
  Description of Artificial Sequence: Synthetic primer
aactgggggacgatcatag

SEQ ID NO: 3080 - DNA, 20 bp, Artificial Sequence
  Description of Artificial Sequence: Synthetic primer
cgtaccctgtcgtctcaact

SEQ ID NO: 3081 - DNA, 20 bp, Artificial Sequence
  Description of Artificial Sequence: Synthetic primer
ctaaccctaaccccactcgt

SEQ ID NO: 3082 - DNA, 20 bp, Artificial Sequence
  Description of Artificial Sequence: Synthetic primer
ccgcatctactgttgaggtc

SEQ ID NO: 3083 - DNA, 20 bp, Artificial Sequence
  Description of Artificial Sequence: Synthetic primer
gtgttaccgaagcagcatct

SEQ ID NO: 3084 - DNA, 20 bp, Artificial Sequence
  Description of Artificial Sequence: Synthetic primer
tcggtaaaggtacagcaagc

SEQ ID NO: 3085 - DNA, 20 bp, Artificial Sequence
  Description of Artificial Sequence: Synthetic primer
ggtgcagaacccacatgata

SEQ ID NO: 3086 - DNA, 20 bp, Artificial Sequence
  Description of Artificial Sequence: Synthetic primer
gtcgtaagatgacgcacaca

SEQ ID NO: 3087 - DNA, 20 bp, Artificial Sequence
  Description of Artificial Sequence: Synthetic primer
agtggagaaatacttggggg

SEQ ID NO: 3088 - DNA, 20 bp, Artificial Sequence
  Description of Artificial Sequence: Synthetic primer
gtccctcgctcctttcttac

SEQ ID NO: 3089 - DNA, 20 bp, Artificial Sequence
  Description of Artificial Sequence: Synthetic primer
aactgggaggttcagaggtc

SEQ ID NO: 3090 - DNA, 20 bp, Artificial Sequence
  Description of Artificial Sequence: Synthetic primer
cctcgggaacatcactagaa

SEQ ID NO: 3091 - DNA, 20 bp, Artificial Sequence
  Description of Artificial Sequence: Synthetic primer
catacgaggttaaagcgacg

SEQ ID NO: 3092 - DNA, 20 bp, Artificial Sequence
  Description of Artificial Sequence: Synthetic primer
ttcacttctcaagctcccac

SEQ ID NO: 3093 - DNA, 20 bp, Artificial Sequence
  Description of Artificial Sequence: Synthetic primer
ctctgcaactattcccttcc

SEQ ID NO: 3094 - DNA, 20 bp, Artificial Sequence
  Description of Artificial Sequence: Synthetic primer
cctacaaatcaacacagccc

SEQ ID NO: 3095 - DNA, 20 bp, Artificial Sequence
  Description of Artificial Sequence: Synthetic primer
actacagaaacgatggcacc

SEQ ID NO: 3096 - DNA, 20 bp, Artificial Sequence
  Description of Artificial Sequence: Synthetic primer
gagggtgaaccagtcgtatg

SEQ ID NO: 3097 - DNA, 20 bp, Artificial Sequence
  Description of Artificial Sequence: Synthetic primer
agaaggtcgctgaagaggat

SEQ ID NO: 3098 - DNA, 20 bp, Artificial Sequence
  Description of Artificial Sequence: Synthetic primer
cactcctccacctcatcatc

SEQ ID NO: 3099 - DNA, 20 bp, Artificial Sequence
  Description of Artificial Sequence: Synthetic primer
tacacaaccacaacagccac

SEQ ID NO: 3100 - DNA, 20 bp, Artificial Sequence
  Description of Artificial Sequence: Synthetic primer
gtggctcgatagcagagtgt

SEQ ID NO: 3101 - DNA, 20 bp, Artificial Sequence
  Description of Artificial Sequence: Synthetic primer
ctttcaccatcttccaccac

SEQ ID NO: 3102 - DNA, 20 bp, Artificial Sequence
  Description of Artificial Sequence: Synthetic primer
cactgctggtgttgcattag

SEQ ID NO: 3103 - DNA, 20 bp, Artificial Sequence
  Description of Artificial Sequence: Synthetic primer
aacaacctccacaccacagt

SEQ ID NO: 3104 - DNA, 20 bp, Artificial Sequence
  Description of Artificial Sequence: Synthetic primer
aagccctcagttcactcctt

SEQ ID NO: 3105 - DNA, 20 bp, Artificial Sequence
  Description of Artificial Sequence: Synthetic primer
aaccagttgatgatctcccc

SEQ ID NO: 3106 - DNA, 20 bp, Artificial Sequence
  Description of Artificial Sequence: Synthetic primer
agcttcacaaccctcacaag

SEQ ID NO: 3107 - DNA, 20 bp, Artificial Sequence
  Description of Artificial Sequence: Synthetic primer
aggttgcatgtgtgtgtcag

SEQ ID NO: 3108 - DNA, 20 bp, Artificial Sequence
  Description of Artificial Sequence: Synthetic primer
tcttccgccacaagttctac

SEQ ID NO: 3109 - DNA, 20 bp, Artificial Sequence
  Description of Artificial Sequence: Synthetic primer
attcactaccgccacatctc

SEQ ID NO: 3110 - DNA, 20 bp, Artificial Sequence
  Description of Artificial Sequence: Synthetic primer
tcgagttcgacttacgtggt

SEQ ID NO: 3111 - DNA, 20 bp, Artificial Sequence
  Description of Artificial Sequence: Synthetic primer
agtcagcactttgaaccgtc

SEQ ID NO: 3112 - DNA, 20 bp, Artificial Sequence
  Description of Artificial Sequence: Synthetic primer
tagagtcatggaccaaggga

SEQ ID NO: 3113 - DNA, 20 bp, Artificial Sequence
  Description of Artificial Sequence: Synthetic primer
gaattctcagccgtcttctg

SEQ ID NO: 3114 - DNA, 20 bp, Artificial Sequence
  Description of Artificial Sequence: Synthetic primer
accatgtcttcttctgctgc

SEQ ID NO: 3115 - DNA, 20 bp, Artificial Sequence
  Description of Artificial Sequence: Synthetic primer
ctccttatcctggtgggttt

SEQ ID NO: 3116 - DNA, 20 bp, Artificial Sequence
  Description of Artificial Sequence: Synthetic primer
cgcttaacctctgttccaag

SEQ ID NO: 3117 - DNA, 20 bp, Artificial Sequence
  Description of Artificial Sequence: Synthetic primer
ccttccctttagatccgtgt

SEQ ID NO: 3118 - DNA, 20 bp, Artificial Sequence
  Description of Artificial Sequence: Synthetic primer
gatctgaagctcccaactga

SEQ ID NO: 3119 - DNA, 20 bp, Artificial Sequence
  Description of Artificial Sequence: Synthetic primer
gtggacctgcttgaagagaa

SEQ ID NO: 3120 - DNA, 20 bp, Artificial Sequence
  Description of Artificial Sequence: Synthetic primer
cctccataggacacatcgaa

SEQ ID NO: 3121 - DNA, 20 bp, Artificial Sequence
  Description of Artificial Sequence: Synthetic primer
tagaaggatgacgtcaggga

SEQ ID NO: 3122 - DNA, 20 bp, Artificial Sequence
  Description of Artificial Sequence: Synthetic primer
ggagagcttgcttgcactta

SEQ ID NO: 3123 - DNA, 20 bp, Artificial Sequence
  Description of Artificial Sequence: Synthetic primer
ccagaccaaaccagatgaac

SEQ ID NO: 3124 - DNA, 18 bp, Artificial Sequence
  Description of Artificial Sequence: Synthetic primer
gcaatccattcgagcaag

SEQ ID NO: 3125 - DNA, 19 bp, Artificial Sequence
  Description of Artificial Sequence: Synthetic primer
gcagcgacggttttagtgt

SEQ ID NO: 3126 - DNA, 20 bp, Artificial Sequence
  Description of Artificial Sequence: Synthetic primer
actcgttcgaactcgttcac

SEQ ID NO: 3127 - DNA, 20 bp, Artificial Sequence
  Description of Artificial Sequence: Synthetic primer
gggtattgataatcggaggg

SEQ ID NO: 3128 - DNA, 18 bp, Artificial Sequence
  Description of Artificial Sequence: Synthetic primer
tccattcccccttttcac

SEQ ID NO: 3129 - DNA, 19 bp, Artificial Sequence
  Description of Artificial Sequence: Synthetic primer
gatccctcaacaacggaag

SEQ ID NO: 3130 - DNA, 19 bp, Artificial Sequence
  Description of Artificial Sequence: Synthetic primer
gctccacatcagaacgtca

SEQ ID NO: 3131 - DNA, 20 bp, Artificial Sequence
  Description of Artificial Sequence: Synthetic primer
ctccacaaacttcctgcaac

SEQ ID NO: 3132 - DNA, 19 bp, Artificial Sequence
  Description of Artificial Sequence: Synthetic primer
tgggcgaatgttaggagtc

SEQ ID NO: 3133 - DNA, 20 bp, Artificial Sequence
  Description of Artificial Sequence: Synthetic primer
actcctgcctaaaccctaga

SEQ ID NO: 3134 - DNA, 20 bp, Artificial Sequence
  Description of Artificial Sequence: Synthetic primer
attctgttctggcgagtgag

SEQ ID NO: 3135 - DNA, 20 bp, Artificial Sequence
  Description of Artificial Sequence: Synthetic primer
gtcgtaaaggttgacgagga

SEQ ID NO: 3136 - DNA, 20 bp, Artificial Sequence
  Description of Artificial Sequence: Synthetic primer
tcaaccggtagcagaagaag

SEQ ID NO: 3137 - DNA, 20 bp, Artificial Sequence
  Description of Artificial Sequence: Synthetic primer
ctttggcctcagttcttctg

SEQ ID NO: 3138 - DNA, 20 bp, Artificial Sequence
  Description of Artificial Sequence: Synthetic primer
cctcgtctcatcttcgattc

SEQ ID NO: 3139 - DNA, 20 bp, Artificial Sequence
  Description of Artificial Sequence: Synthetic primer
ccactcttcctccattgcta

SEQ ID NO: 3140 - DNA, 20 bp, Artificial Sequence
  Description of Artificial Sequence: Synthetic primer
ccaacaccttcaatctcgac

SEQ ID NO: 3141 - DNA, 20 bp, Artificial Sequence
  Description of Artificial Sequence: Synthetic primer
attatctccggccaggtatc

SEQ ID NO: 3142 - DNA, 20 bp, Artificial Sequence
  Description of Artificial Sequence: Synthetic primer
gaccatgaccaagaccagac

SEQ ID NO: 3143 - DNA, 20 bp, Artificial Sequence
  Description of Artificial Sequence: Synthetic primer
gacaatgaagcctctcctcc

SEQ ID NO: 3144 - DNA, 20 bp, Artificial Sequence
  Description of Artificial Sequence: Synthetic primer
taccctcctcagaccctacc

SEQ ID NO: 3145 - DNA, 20 bp, Artificial Sequence
  Description of Artificial Sequence: Synthetic primer
aaaccctatccttccacagc

SEQ ID NO: 3146 - DNA, 20 bp, Artificial Sequence
  Description of Artificial Sequence: Synthetic primer
acggctacaccatcatcatc

SEQ ID NO: 3147 - DNA, 20 bp, Artificial Sequence
  Description of Artificial Sequence: Synthetic primer
cgatgctctggataagcagt

SEQ ID NO: 3148 - DNA, 20 bp, Artificial Sequence
  Description of Artificial Sequence: Synthetic primer
aacctaccaccacacaaacc

SEQ ID NO: 3149 - DNA, 20 bp, Artificial Sequence
  Description of Artificial Sequence: Synthetic primer
cgtgtcctttcccttaacct

SEQ ID NO: 3150 - DNA, 20 bp, Artificial Sequence
  Description of Artificial Sequence: Synthetic primer
caatccacccttcagttcac

SEQ ID NO: 3151 - DNA, 20 bp, Artificial Sequence
  Description of Artificial Sequence: Synthetic primer
gacggacgtagattttgctg

SEQ ID NO: 3152 - DNA, 20 bp, Artificial Sequence
  Description of Artificial Sequence: Synthetic primer
acctacgaccatccagacaa

SEQ ID NO: 3153 - DNA, 20 bp, Artificial Sequence
  Description of Artificial Sequence: Synthetic primer
gtcgctgaatcaatggctac

SEQ ID NO: 3154 - DNA, 18 bp, Artificial Sequence
  Description of Artificial Sequence: Synthetic primer
acggcaccgtttcacttt

SEQ ID NO: 3155 - DNA, 20 bp, Artificial Sequence
  Description of Artificial Sequence: Synthetic primer
aggtaacggtatggtcccac

SEQ ID NO: 3156 - DNA, 19 bp, Artificial Sequence
  Description of Artificial Sequence: Synthetic primer
ccttcaggtgccaagaaac

SEQ ID NO: 3157 - DNA, 20 bp, Artificial Sequence
  Description of Artificial Sequence: Synthetic primer
ggacgaagaaactatccggt

SEQ ID NO: 3158 - DNA, 20 bp, Artificial Sequence
  Description of Artificial Sequence: Synthetic primer
ccgtctatgtgtctgggaac

SEQ ID NO: 3159 - DNA, 20 bp, Artificial Sequence
  Description of Artificial Sequence: Synthetic primer
gggtggagatcctgagaagt

SEQ ID NO: 3160 - DNA, 20 bp, Artificial Sequence
  Description of Artificial Sequence: Synthetic primer
gctgatcgagaggaagatca

SEQ ID NO: 3161 - DNA, 20 bp, Artificial Sequence
  Description of Artificial Sequence: Synthetic primer
ccctaaccctaacccacaat

SEQ ID NO: 3162 - DNA, 20 bp, Artificial Sequence
  Description of Artificial Sequence: Synthetic primer
ccgtaacaaaccacggttac

SEQ ID NO: 3163 - DNA, 20 bp, Artificial Sequence
  Description of Artificial Sequence: Synthetic primer
actcgatacccaaatcctcc

SEQ ID NO: 3164 - DNA, 20 bp, Artificial Sequence
  Description of Artificial Sequence: Synthetic primer
cttcgtcaccctacaacctg

SEQ ID NO: 3165 - DNA, 18 bp, Artificial Sequence
  Description of Artificial Sequence: Synthetic primer
cacatctcaaacatggcg

SEQ ID NO: 3166 - DNA, 20 bp, Artificial Sequence
  Description of Artificial Sequence: Synthetic primer
agcagacagtttgtgcctct

SEQ ID NO: 3167 - DNA, 20 bp, Artificial Sequence
  Description of Artificial Sequence: Synthetic primer
ggtttcgatcttcctccttc

SEQ ID NO: 3168 - DNA, 20 bp, Artificial Sequence
  Description of Artificial Sequence: Synthetic primer
gtttccttctctaccggctc

SEQ ID NO: 3169 - DNA, 20 bp, Artificial Sequence
  Description of Artificial Sequence: Synthetic primer
acgtggatgtgtacgaaggt

SEQ ID NO: 3170 - DNA, 19 bp, Artificial Sequence
  Description of Artificial Sequence: Synthetic primer
cccgtcatcacatcacact

SEQ ID NO: 3171 - DNA, 20 bp, Artificial Sequence
  Description of Artificial Sequence: Synthetic primer
ctacttcaccaccaaccacc

SEQ ID NO: 3172 - DNA, 18 bp, Artificial Sequence
  Description of Artificial Sequence: Synthetic primer
tccggtttctttggaagg

SEQ ID NO: 3173 - DNA, 19 bp, Artificial Sequence
  Description of Artificial Sequence: Synthetic primer
aaagtgcctgagcaccaac

SEQ ID NO: 3174 - DNA, 20 bp, Artificial Sequence
  Description of Artificial Sequence: Synthetic primer
gtccccaacgtattctcctt

SEQ ID NO: 3175 - DNA, 20 bp, Artificial Sequence
  Description of Artificial Sequence: Synthetic primer
cctgtaacgtgtggtcatca

SEQ ID NO: 3176 - DNA, 20 bp, Artificial Sequence
  Description of Artificial Sequence: Synthetic primer
accaccaccggaaaagttac

SEQ ID NO: 3177 - DNA, 20 bp, Artificial Sequence
  Description of Artificial Sequence: Synthetic primer
cagagtgcaagatcaaaggg

SEQ ID NO: 3178 - DNA, 20 bp, Artificial Sequence
  Description of Artificial Sequence: Synthetic primer
ctaaccctaaccccactcgt

SEQ ID NO: 3179 - DNA, 19 bp, Artificial Sequence
  Description of Artificial Sequence: Synthetic primer
cacaacaaccaccacaacc

SEQ ID NO: 3180 - DNA, 20 bp, Artificial Sequence
  Description of Artificial Sequence: Synthetic primer
ctggttgttgttggttaggg

SEQ ID NO: 3181 - DNA, 21 bp, Artificial Sequence
  Description of Artificial Sequence: Synthetic primer
ggagtacagaaagcgaagacg

SEQ ID NO: 3182 - DNA, 20 bp, Artificial Sequence
  Description of Artificial Sequence: Synthetic primer
gggagtagtagcagcttccc

SEQ ID NO: 3183 - DNA, 19 bp, Artificial Sequence
  Description of Artificial Sequence: Synthetic primer
acaagattcaaccccctcc

SEQ ID NO: 3184 - DNA, 20 bp, Artificial Sequence
  Description of Artificial Sequence: Synthetic primer
acccaatctccaccctactc

SEQ ID NO: 3185 - DNA, 20 bp, Artificial Sequence
  Description of Artificial Sequence: Synthetic primer
aaacacctgaatctcctccc

SEQ ID NO: 3186 - DNA, 21 bp, Artificial Sequence
  Description of Artificial Sequence: Synthetic primer
ctacagctcacacacacatcg

SEQ ID NO: 3187 - DNA, 18 bp, Artificial Sequence
  Description of Artificial Sequence: Synthetic primer
ctaaaccgcgattggtgt

SEQ ID NO: 3188 - DNA, 18 bp, Artificial Sequence
  Description of Artificial Sequence: Synthetic primer
ctaaaccgcgattggtgt

SEQ ID NO: 3189 - DNA, 20 bp, Artificial Sequence
  Description of Artificial Sequence: Synthetic primer
ctcaatcactcactccacca

SEQ ID NO: 3190 - DNA, 20 bp, Artificial Sequence
  Description of Artificial Sequence: Synthetic primer
caccgcttccagaagaaaac

SEQ ID NO: 3191 - DNA, 20 bp, Artificial Sequence
  Description of Artificial Sequence: Synthetic primer
caaaggttgcagaggctaag

SEQ ID NO: 3192 - DNA, 20 bp, Artificial Sequence
  Description of Artificial Sequence: Synthetic primer
gacaggtatccgagcaactg

SEQ ID NO: 3193 - DNA, 20 bp, Artificial Sequence
  Description of Artificial Sequence: Synthetic primer
gagtagctcagctcgtttgc

SEQ ID NO: 3194 - DNA, 20 bp, Artificial Sequence
  Description of Artificial Sequence: Synthetic primer
atagtggaccgagctttgtg

SEQ ID NO: 3195 - DNA, 20 bp, Artificial Sequence
  Description of Artificial Sequence: Synthetic primer
aaaatgtccctctccaccac

SEQ ID NO: 3196 - DNA, 20 bp, Artificial Sequence
  Description of Artificial Sequence: Synthetic primer
gtgtgatggtaacggtggtt

SEQ ID NO: 3197 - DNA, 20 bp, Artificial Sequence
  Description of Artificial Sequence: Synthetic primer
atcatctgacggtccagaac

SEQ ID NO: 3198 - DNA, 20 bp, Artificial Sequence
  Description of Artificial Sequence: Synthetic primer
agtgctgggtcgtgtaatgt

SEQ ID NO: 3199 - DNA, 20 bp, Artificial Sequence
  Description of Artificial Sequence: Synthetic primer
taccagccaggaagaaacag

SEQ ID NO: 3200 - DNA, 20 bp, Artificial Sequence
  Description of Artificial Sequence: Synthetic primer
cgaggactgtcttgagcttc

SEQ ID NO: 3201 - DNA, 20 bp, Artificial Sequence
  Description of Artificial Sequence: Synthetic primer
agctgacaactacatgctgg

SEQ ID NO: 3202 - DNA, 20 bp, Artificial Sequence
  Description of Artificial Sequence: Synthetic primer
tcgagaggataatctgcacc

SEQ ID NO: 3203 - DNA, 20 bp, Artificial Sequence
  Description of Artificial Sequence: Synthetic primer
tcgtggccttcttcatctac

SEQ ID NO: 3204 - DNA, 20 bp, Artificial Sequence
  Description of Artificial Sequence: Synthetic primer
ccaattcgtgtccttactcg

SEQ ID NO: 3205 - DNA, 20 bp, Artificial Sequence
  Description of Artificial Sequence: Synthetic primer
gggtttcgtctgctacttgt

SEQ ID NO: 3206 - DNA, 20 bp, Artificial Sequence
  Description of Artificial Sequence: Synthetic primer
ctaatccaaccagcacacct

SEQ ID NO: 3207 - DNA, 20 bp, Artificial Sequence
  Description of Artificial Sequence: Synthetic primer
cagtagctgctccatcatcc

SEQ ID NO: 3208 - DNA, 20 bp, Artificial Sequence
  Description of Artificial Sequence: Synthetic primer
gacggtatccatgctgttct

SEQ ID NO: 3209 - DNA, 20 bp, Artificial Sequence
  Description of Artificial Sequence: Synthetic primer
taatctccctcccctaccac

SEQ ID NO: 3210 - DNA, 20 bp, Artificial Sequence
  Description of Artificial Sequence: Synthetic primer
gacgtggtggagaacatagg

SEQ ID NO: 3211 - DNA, 20 bp, Artificial Sequence
  Description of Artificial Sequence: Synthetic primer
cgccagactccgtaatgata

SEQ ID NO: 3212 - DNA, 20 bp, Artificial Sequence
  Description of Artificial Sequence: Synthetic primer
tgggtatggttcaaggtgtc

SEQ ID NO: 3213 - DNA, 18 bp, Artificial Sequence
  Description of Artificial Sequence: Synthetic primer
caacaaaatggacccacg

SEQ ID NO: 3214 - DNA, 20 bp, Artificial Sequence
  Description of Artificial Sequence: Synthetic primer
tctctacagccgctagtcgt

SEQ ID NO: 3215 - DNA, 20 bp, Artificial Sequence
  Description of Artificial Sequence: Synthetic primer
agcagttctgatggagcttg

SEQ ID NO: 3216 - DNA, 20 bp, Artificial Sequence
  Description of Artificial Sequence: Synthetic primer
cagtaggcatcacaacatgg

SEQ ID NO: 3217 - DNA, 20 bp, Artificial Sequence
  Description of Artificial Sequence: Synthetic primer
cactcctcatccagtcatcc

SEQ ID NO: 3218 - DNA, 20 bp, Artificial Sequence
  Description of Artificial Sequence: Synthetic primer
acctcctcaagcttccactt

SEQ ID NO: 3219 - DNA, 20 bp, Artificial Sequence
  Description of Artificial Sequence: Synthetic primer
gcagaaagtccaccaaagac

SEQ ID NO: 3220 - DNA, 20 bp, Artificial Sequence
  Description of Artificial Sequence: Synthetic primer
gcagaaagtccaccaaagac

SEQ ID NO: 3221 - DNA, 20 bp, Artificial Sequence
  Description of Artificial Sequence: Synthetic primer
aagctatgtgtcaaggctgg

SEQ ID NO: 3222 - DNA, 20 bp, Artificial Sequence
  Description of Artificial Sequence: Synthetic primer
cacaggggtggagtcaatag

SEQ ID NO: 3223 - DNA, 20 bp, Artificial Sequence
  Description of Artificial Sequence: Synthetic primer
caaacactacggacagagca

SEQ ID NO: 3224 - DNA, 20 bp, Artificial Sequence
  Description of Artificial Sequence: Synthetic primer
actcttcacatacttcgccg

SEQ ID NO: 3225 - DNA, 20 bp, Artificial Sequence
  Description of Artificial Sequence: Synthetic primer
cccaaccaaagccactttac

SEQ ID NO: 3226 - DNA, 20 bp, Artificial Sequence
  Description of Artificial Sequence: Synthetic primer
atctgctccgaatctcagtg

SEQ ID NO: 3227 - DNA, 20 bp, Artificial Sequence
  Description of Artificial Sequence: Synthetic primer
gaacccgttgtatgttggtc

SEQ ID NO: 3228 - DNA, 20 bp, Artificial Sequence
  Description of Artificial Sequence: Synthetic primer
aaccgtcaccgtcactctaa

SEQ ID NO: 3229 - DNA, 20 bp, Artificial Sequence
  Description of Artificial Sequence: Synthetic primer
cacagttgtatgttgcgacc

SEQ ID NO: 3230 - DNA, 20 bp, Artificial Sequence
  Description of Artificial Sequence: Synthetic primer
agacaacctcgatatgtccg

SEQ ID NO: 3231 - DNA, 20 bp, Artificial Sequence
  Description of Artificial Sequence: Synthetic primer
ctcttcctttgatccaaccc

SEQ ID NO: 3232 - DNA, 20 bp, Artificial Sequence
  Description of Artificial Sequence: Synthetic primer
acggagaagagggtagcagt

SEQ ID NO: 3233 - DNA, 20 bp, Artificial Sequence
  Description of Artificial Sequence: Synthetic primer
ccaataactcggacccttct

SEQ ID NO: 3234 - DNA, 19 bp, Artificial Sequence
  Description of Artificial Sequence: Synthetic primer
ctacacttttccccgggtt

SEQ ID NO: 3235 - DNA, 20 bp, Artificial Sequence
  Description of Artificial Sequence: Synthetic primer
cgggcagtctcagttatctc

SEQ ID NO: 3236 - DNA, 20 bp, Artificial Sequence
  Description of Artificial Sequence: Synthetic primer
cgtatgcaaggtctttcgtc

SEQ ID NO: 3237 - DNA, 20 bp, Artificial Sequence
  Description of Artificial Sequence: Synthetic primer
agacaacgatctgcacacct

SEQ ID NO: 3238 - DNA, 20 bp, Artificial Sequence
  Description of Artificial Sequence: Synthetic primer
ggatcacaccaaacagatcc

SEQ ID NO: 3239 - DNA, 20 bp, Artificial Sequence
  Description of Artificial Sequence: Synthetic primer
atagcccttccagattcacc

SEQ ID NO: 3240 - DNA, 20 bp, Artificial Sequence
  Description of Artificial Sequence: Synthetic primer
cgacggtgaaacagtagctt

SEQ ID NO: 3241 - DNA, 20 bp, Artificial Sequence
  Description of Artificial Sequence: Synthetic primer
ccacatgccactagttaccc

SEQ ID NO: 3242 - DNA, 20 bp, Artificial Sequence
  Description of Artificial Sequence: Synthetic primer
ccacatgccactagttaccc

SEQ ID NO: 3243 - DNA, 20 bp, Artificial Sequence
  Description of Artificial Sequence: Synthetic primer
cacaggaggagcaagactgt

SEQ ID NO: 3244 - DNA, 20 bp, Artificial Sequence
  Description of Artificial Sequence: Synthetic primer
attcctcaggtggtgctgta

SEQ ID NO: 3245 - DNA, 18 bp, Artificial Sequence
  Description of Artificial Sequence: Synthetic primer
gaaacattaatggggcgg

SEQ ID NO: 3246 - DNA, 20 bp, Artificial Sequence
  Description of Artificial Sequence: Synthetic primer
ggatctgatgtacgtccctg

SEQ ID NO: 3247 - DNA, 20 bp, Artificial Sequence
  Description of Artificial Sequence: Synthetic primer
cctctgtttcacctttgtgg

SEQ ID NO: 3248 - DNA, 20 bp, Artificial Sequence
  Description of Artificial Sequence: Synthetic primer
tgctgactgatactgctgga

SEQ ID NO: 3249 - DNA, 20 bp, Artificial Sequence
  Description of Artificial Sequence: Synthetic primer
ggttatctgagaagccagca

SEQ ID NO: 3250 - DNA, 20 bp, Artificial Sequence
  Description of Artificial Sequence: Synthetic primer
gtggtgagtcgtttttggtc

SEQ ID NO: 3251 - DNA, 20 bp, Artificial Sequence
  Description of Artificial Sequence: Synthetic primer
ataggggattctcgtaaccg

SEQ ID NO: 3252 - DNA, 20 bp, Artificial Sequence
  Description of Artificial Sequence: Synthetic primer
gatttcgggctaaagaggtc

SEQ ID NO: 3253 - DNA, 20 bp, Artificial Sequence
  Description of Artificial Sequence: Synthetic primer
gcaacgttaaagacggtgac

SEQ ID NO: 3254 - DNA, 20 bp, Artificial Sequence
  Description of Artificial Sequence: Synthetic primer
gggggagaaagagagaaaca

SEQ ID NO: 3255 - DNA, 20 bp, Artificial Sequence
  Description of Artificial Sequence: Synthetic primer
actttcacacaacgtcctcc

SEQ ID NO: 3256 - DNA, 20 bp, Artificial Sequence
  Description of Artificial Sequence: Synthetic primer
actttcacacaacgtcctcc

SEQ ID NO: 3257 - DNA, 20 bp, Artificial Sequence
  Description of Artificial Sequence: Synthetic primer
ggcactttaaggagctgtga

SEQ ID NO: 3258 - DNA, 20 bp, Artificial Sequence
  Description of Artificial Sequence: Synthetic primer
cattaggaggtggaaaccct

SEQ ID NO: 3259 - DNA, 20 bp, Artificial Sequence
  Description of Artificial Sequence: Synthetic primer
tgacataaggagcccagtgt

SEQ ID NO: 3260 - DNA, 20 bp, Artificial Sequence
  Description of Artificial Sequence: Synthetic primer
agaggaattactgagggcgt

SEQ ID NO: 3261 - DNA, 20 bp, Artificial Sequence
  Description of Artificial Sequence: Synthetic primer
gatcagcggcaagtagtgtt

SEQ ID NO: 3262 - DNA, 20 bp, Artificial Sequence
  Description of Artificial Sequence: Synthetic primer
gcttctctaaactggccaca

SEQ ID NO: 3263 - DNA, 20 bp, Artificial Sequence
  Description of Artificial Sequence: Synthetic primer
gtgcttgctgtcagcttatg

SEQ ID NO: 3264 - DNA, 18 bp, Artificial Sequence
  Description of Artificial Sequence: Synthetic primer
tgagctaacgccacatct

SEQ ID NO: 3265 - DNA, 20 bp, Artificial Sequence
  Description of Artificial Sequence: Synthetic primer
cggctgtgaagtgaaatacc

SEQ ID NO: 3266 - DNA, 20 bp, Artificial Sequence
  Description of Artificial Sequence: Synthetic primer
acctcggggatttctacaac

SEQ ID NO: 3267 - DNA, 20 bp, Artificial Sequence
  Description of Artificial Sequence: Synthetic primer
gaaccatcggtacgattctg

SEQ ID NO: 3268 - DNA, 20 bp, Artificial Sequence
  Description of Artificial Sequence: Synthetic primer
tgggataactctagccacca

SEQ ID NO: 3269 - DNA, 20 bp, Artificial Sequence
  Description of Artificial Sequence: Synthetic primer
agccgatgtacacttcttcg

SEQ ID NO: 3270 - DNA, 20 bp, Artificial Sequence
  Description of Artificial Sequence: Synthetic primer
atctcctccttcaacggttc

SEQ ID NO: 3271 - DNA, 20 bp, Artificial Sequence
  Description of Artificial Sequence: Synthetic primer
cagtaccagttccagttccg

SEQ ID NO: 3272 - DNA, 20 bp, Artificial Sequence
  Description of Artificial Sequence: Synthetic primer
cactcccaccattgaaagtc

SEQ ID NO: 3273 - DNA, 19 bp, Artificial Sequence
  Description of Artificial Sequence: Synthetic primer
caaccccatcaacaaccac

SEQ ID NO: 3274 - DNA, 20 bp, Artificial Sequence
  Description of Artificial Sequence: Synthetic primer
atagagcgtggcatagttgg

SEQ ID NO: 3275 - DNA, 20 bp, Artificial Sequence
  Description of Artificial Sequence: Synthetic primer
tacagctccgactgacaaca

SEQ ID NO: 3276 - DNA, 20 bp, Artificial Sequence
  Description of Artificial Sequence: Synthetic primer
caggatctggaaactcatcg

SEQ ID NO: 3277 - DNA, 20 bp, Artificial Sequence
  Description of Artificial Sequence: Synthetic primer
caccaatagaagtggcaacc

SEQ ID NO: 3278 - DNA, 20 bp, Artificial Sequence
  Description of Artificial Sequence: Synthetic primer
accaacctcatcttctgacg

SEQ ID NO: 3279 - DNA, 20 bp, Artificial Sequence
  Description of Artificial Sequence: Synthetic primer
acctgattccgacctagacc

SEQ ID NO: 3280 - DNA, 20 bp, Artificial Sequence
  Description of Artificial Sequence: Synthetic primer
acatgctccacctccttgta

SEQ ID NO: 3281 - DNA, 20 bp, Artificial Sequence
  Description of Artificial Sequence: Synthetic primer
agactgtgattcaggcttcg

SEQ ID NO: 3282 - DNA, 20 bp, Artificial Sequence
  Description of Artificial Sequence: Synthetic primer
accttcactcacaaagctcg

SEQ ID NO: 3283 - DNA, 20 bp, Artificial Sequence
  Description of Artificial Sequence: Synthetic primer
gccatctttggagtaaaggg

SEQ ID NO: 3284 - DNA, 20 bp, Artificial Sequence
  Description of Artificial Sequence: Synthetic primer
caaacaggagagcagaaagc

SEQ ID NO: 3285 - DNA, 20 bp, Artificial Sequence
  Description of Artificial Sequence: Synthetic primer
gctctcaagttactgcagcc

SEQ ID NO: 3286 - DNA, 20 bp, Artificial Sequence
  Description of Artificial Sequence: Synthetic primer
gcctccagtagtggtagcaa

SEQ ID NO: 3287 - DNA, 20 bp, Artificial Sequence
  Description of Artificial Sequence: Synthetic primer
gacggtggagatggttgtag

SEQ ID NO: 3288 - DNA, 20 bp, Artificial Sequence
  Description of Artificial Sequence: Synthetic primer
accaccttatggcaaggact

SEQ ID NO: 3289 - DNA, 20 bp, Artificial Sequence
  Description of Artificial Sequence: Synthetic primer
tcttcgaaaccgtagaccag

SEQ ID NO: 3290 - DNA, 20 bp, Artificial Sequence
  Description of Artificial Sequence: Synthetic primer
aagttcggccctatactgct

SEQ ID NO: 3291 - DNA, 20 bp, Artificial Sequence
  Description of Artificial Sequence: Synthetic primer
ttatgctgacttcctcagcc

SEQ ID NO: 3292 - DNA, 20 bp, Artificial Sequence
  Description of Artificial Sequence: Synthetic primer
atcgttgtccactagcttcg

SEQ ID NO: 3293 - DNA, 20 bp, Artificial Sequence
  Description of Artificial Sequence: Synthetic primer
cggttaggtcattgatggag

SEQ ID NO: 3294 - DNA, 20 bp, Artificial Sequence
  Description of Artificial Sequence: Synthetic primer
acggtgcactgcttactttc

SEQ ID NO: 3295 - DNA, 20 bp, Artificial Sequence
  Description of Artificial Sequence: Synthetic primer
ttgtgtatcgacagctgcac

SEQ ID NO: 3296 - DNA, 20 bp, Artificial Sequence
  Description of Artificial Sequence: Synthetic primer
cccatgagatgacttcaacc

SEQ ID NO: 3297 - DNA, 20 bp, Artificial Sequence
  Description of Artificial Sequence: Synthetic primer
agtgtcaaacgtgcctaacc

SEQ ID NO: 3298 - DNA, 20 bp, Artificial Sequence
  Description of Artificial Sequence: Synthetic primer
agggagtagcaagggaagaa

SEQ ID NO: 3299 - DNA, 20 bp, Artificial Sequence
  Description of Artificial Sequence: Synthetic primer
gggagtagcaagggaagaag

SEQ ID NO: 3300 - DNA, 20 bp, Artificial Sequence
  Description of Artificial Sequence: Synthetic primer
catctccctgtaatcgcttg

SEQ ID NO: 3301 - DNA, 20 bp, Artificial Sequence
  Description of Artificial Sequence: Synthetic primer
tcaaataggtcggagacagc

SEQ ID NO: 3302 - DNA, 20 bp, Artificial Sequence
  Description of Artificial Sequence: Synthetic primer
cacatgtatgttggtgacgg

SEQ ID NO: 3303 - DNA, 20 bp, Artificial Sequence
  Description of Artificial Sequence: Synthetic primer
ctttgtccttgctcgtctgt

SEQ ID NO: 3304 - DNA, 20 bp, Artificial Sequence
  Description of Artificial Sequence: Synthetic primer
cggtaacctggagggtattt

SEQ ID NO: 3305 - DNA, 20 bp, Artificial Sequence
  Description of Artificial Sequence: Synthetic primer
ctgctacaagaaccgctgat

SEQ ID NO: 3306 - DNA, 20 bp, Artificial Sequence
  Description of Artificial Sequence: Synthetic primer
cttgtcgaatatctgcccac

SEQ ID NO: 3307 - DNA, 20 bp, Artificial Sequence
  Description of Artificial Sequence: Synthetic primer
ccggtattctaaactccggt

SEQ ID NO: 3308 - DNA, 22 bp, Artificial Sequence
  Description of Artificial Sequence: Synthetic primer
gatctcgacctagacatccttg

SEQ ID NO: 3309 - DNA, 20 bp, Artificial Sequence
  Description of Artificial Sequence: Synthetic primer
acctcatcttgtgggtggta

SEQ ID NO: 3310 - DNA, 20 bp, Artificial Sequence
  Description of Artificial Sequence: Synthetic primer
cacccaaagaatagcaggtg

SEQ ID NO: 3311 - DNA, 20 bp, Artificial Sequence
  Description of Artificial Sequence: Synthetic primer
tattgaggcctccttctcct

SEQ ID NO: 3312 - DNA, 20 bp, Artificial Sequence
  Description of Artificial Sequence: Synthetic primer
acaaggttcctcatcttccc

SEQ ID NO: 3313 - DNA, 20 bp, Artificial Sequence
  Description of Artificial Sequence: Synthetic primer
ccacgtgtcaagccttattc

SEQ ID NO: 3314 - DNA, 20 bp, Artificial Sequence
  Description of Artificial Sequence: Synthetic primer
tcagcatgttccctctcttc

SEQ ID NO: 3315 - DNA, 20 bp, Artificial Sequence
  Description of Artificial Sequence: Synthetic primer
cctggttcagaagattgcac

SEQ ID NO: 3316 - DNA, 20 bp, Artificial Sequence
  Description of Artificial Sequence: Synthetic primer
aggctgaaggtcttctcgtt

SEQ ID NO: 3317 - DNA, 20 bp, Artificial Sequence
  Description of Artificial Sequence: Synthetic primer
taccgacccctatccctatc

SEQ ID NO: 3318 - DNA, 20 bp, Artificial Sequence
  Description of Artificial Sequence: Synthetic primer
ctcctcctccttcttcctct

SEQ ID NO: 3319 - DNA, 20 bp, Artificial Sequence
  Description of Artificial Sequence: Synthetic primer
aaagaaagggagacaggcac

SEQ ID NO: 3320 - DNA, 20 bp, Artificial Sequence
  Description of Artificial Sequence: Synthetic primer
gtacgaggtttcggagtacg

SEQ ID NO: 3321 - DNA, 20 bp, Artificial Sequence
  Description of Artificial Sequence: Synthetic primer
ataatacttcaccgcctccc

SEQ ID NO: 3322 - DNA, 20 bp, Artificial Sequence
  Description of Artificial Sequence: Synthetic primer
cagcagtctggatctcccta

SEQ ID NO: 3323 - DNA, 20 bp, Artificial Sequence
  Description of Artificial Sequence: Synthetic primer
tatcttccctgcagtaccca

SEQ ID NO: 3324 - DNA, 20 bp, Artificial Sequence
  Description of Artificial Sequence: Synthetic primer
tggaaggtgctgtaggtgat

SEQ ID NO: 3325 - DNA, 20 bp, Artificial Sequence
  Description of Artificial Sequence: Synthetic primer
tacacgtggcagaacacact

SEQ ID NO: 3326 - DNA, 20 bp, Artificial Sequence
  Description of Artificial Sequence: Synthetic primer
cagctcggatgactcaaact

SEQ ID NO: 3327 - DNA, 20 bp, Artificial Sequence
  Description of Artificial Sequence: Synthetic primer
aagctttgaccgacttcctc

SEQ ID NO: 3328 - DNA, 20 bp, Artificial Sequence
  Description of Artificial Sequence: Synthetic primer
atagcaaggcaccagaacag

SEQ ID NO: 3329 - DNA, 20 bp, Artificial Sequence
  Description of Artificial Sequence: Synthetic primer
tgtcctgccttctcaaagag

SEQ ID NO: 3330 - DNA, 20 bp, Artificial Sequence
  Description of Artificial Sequence: Synthetic primer
ctgtaacaccgagtcccatc

SEQ ID NO: 3331 - DNA, 20 bp, Artificial Sequence
  Description of Artificial Sequence: Synthetic primer
gctagcctcacatagaccga

SEQ ID NO: 3332 - DNA, 20 bp, Artificial Sequence
  Description of Artificial Sequence: Synthetic primer
ctgcctagcagctaagttgg

SEQ ID NO: 3333 - DNA, 20 bp, Artificial Sequence
  Description of Artificial Sequence: Synthetic primer
atcttggacaggggagaatc

SEQ ID NO: 3334 - DNA, 20 bp, Artificial Sequence
  Description of Artificial Sequence: Synthetic primer
aatgactctaccagcgcaac

SEQ ID NO: 3335 - DNA, 20 bp, Artificial Sequence
  Description of Artificial Sequence: Synthetic primer
acctcggggatttctacaac

SEQ ID NO: 3336 - DNA, 20 bp, Artificial Sequence
  Description of Artificial Sequence: Synthetic primer
gttccacgtcatgtctaggg

SEQ ID NO: 3337 - DNA, 20 bp, Artificial Sequence
  Description of Artificial Sequence: Synthetic primer
aggaggaaaaagggggtact

SEQ ID NO: 3338 - DNA, 20 bp, Artificial Sequence
  Description of Artificial Sequence: Synthetic primer
cagaacgtgtcatcgtcaga

SEQ ID NO: 3339 - DNA, 20 bp, Artificial Sequence
  Description of Artificial Sequence: Synthetic primer
gcagctaaaatcctcctcct

SEQ ID NO: 3340 - DNA, 20 bp, Artificial Sequence
  Description of Artificial Sequence: Synthetic primer
gaaagaacttgtcccagagc

SEQ ID NO: 3341 - DNA, 20 bp, Artificial Sequence
  Description of Artificial Sequence: Synthetic primer
tagtcctgaaagccaccttg

SEQ ID NO: 3342 - DNA, 20 bp, Artificial Sequence
  Description of Artificial Sequence: Synthetic primer
agaaacagccatgagaccag

SEQ ID NO: 3343 - DNA, 20 bp, Artificial Sequence
  Description of Artificial Sequence: Synthetic primer
tggaagaccgagtggtgtat

SEQ ID NO: 3344 - DNA, 20 bp, Artificial Sequence
  Description of Artificial Sequence: Synthetic primer
gcatcataggctgcagagat

SEQ ID NO: 3345 - DNA, 20 bp, Artificial Sequence
  Description of Artificial Sequence: Synthetic primer
ctaaagcctgcgagttatcg

SEQ ID NO: 3346 - DNA, 18 bp, Artificial Sequence
  Description of Artificial Sequence: Synthetic primer
gaccaccacgcaatgttt

SEQ ID NO: 3347 - DNA, 20 bp, Artificial Sequence
  Description of Artificial Sequence: Synthetic primer
ttagctcaagaggtgatggc

SEQ ID NO: 3348 - DNA, 20 bp, Artificial Sequence
  Description of Artificial Sequence: Synthetic primer
catcatggttgataggagcc

SEQ ID NO: 3349 - DNA, 20 bp, Artificial Sequence
  Description of Artificial Sequence: Synthetic primer
gtgcttgtgcactatggttg

SEQ ID NO: 3350 - DNA, 19 bp, Artificial Sequence
  Description of Artificial Sequence: Synthetic primer
gctacaaatgagatccccg

SEQ ID NO: 3351 - DNA, 20 bp, Artificial Sequence
  Description of Artificial Sequence: Synthetic primer
ccgtaacaccactggatctc

SEQ ID NO: 3352 - DNA, 20 bp, Artificial Sequence
  Description of Artificial Sequence: Synthetic primer
cttgcaactgcatctgtcac

SEQ ID NO: 3353 - DNA, 20 bp, Artificial Sequence
  Description of Artificial Sequence: Synthetic primer
tcttcctctccgtcacattc

SEQ ID NO: 3354 - DNA, 20 bp, Artificial Sequence
  Description of Artificial Sequence: Synthetic primer
agcaagtctagggtttccgt

SEQ ID NO: 3355 - DNA, 20 bp, Artificial Sequence
  Description of Artificial Sequence: Synthetic primer
cggtgttgtagtgaacgtga

SEQ ID NO: 3356 - DNA, 20 bp, Artificial Sequence
  Description of Artificial Sequence: Synthetic primer
caggttcaaactcaacaggc

SEQ ID NO: 3357 - DNA, 20 bp, Artificial Sequence
  Description of Artificial Sequence: Synthetic primer
cgtctcgtaagcgtttcatc

SEQ ID NO: 3358 - DNA, 20 bp, Artificial Sequence
  Description of Artificial Sequence: Synthetic primer
acaccttctccttcccaaac

SEQ ID NO: 3359 - DNA, 20 bp, Artificial Sequence
  Description of Artificial Sequence: Synthetic primer
aaagcaaggacgagtagggt

SEQ ID NO: 3360 - DNA, 20 bp, Artificial Sequence
  Description of Artificial Sequence: Synthetic primer
gaacagtagacgccgaagaa

SEQ ID NO: 3361 - DNA, 20 bp, Artificial Sequence
  Description of Artificial Sequence: Synthetic primer
tcactccccctttcctattc

SEQ ID NO: 3362 - DNA, 20 bp, Artificial Sequence
  Description of Artificial Sequence: Synthetic primer
cttggtacgttcggtattgg

SEQ ID NO: 3363 - DNA, 20 bp, Artificial Sequence
  Description of Artificial Sequence: Synthetic primer
gtgcaactcatctcttgcct

SEQ ID NO: 3364 - DNA, 20 bp, Artificial Sequence
  Description of Artificial Sequence: Synthetic primer
taccaacaacaacaccctcc

SEQ ID NO: 3365 - DNA, 20 bp, Artificial Sequence
  Description of Artificial Sequence: Synthetic primer
gccctatcagaaacgaacac

SEQ ID NO: 3366 - DNA, 20 bp, Artificial Sequence
  Description of Artificial Sequence: Synthetic primer
gtttcttaggcggcttctct

SEQ ID NO: 3367 - DNA, 20 bp, Artificial Sequence
  Description of Artificial Sequence: Synthetic primer
cgttttgtaccgttacggag

SEQ ID NO: 3368 - DNA, 20 bp, Artificial Sequence
  Description of Artificial Sequence: Synthetic primer
cgtatttctccacaccaacc

SEQ ID NO: 3369 - DNA, 20 bp, Artificial Sequence
  Description of Artificial Sequence: Synthetic primer
gaactagcggctttagcctt

SEQ ID NO: 3370 - DNA, 20 bp, Artificial Sequence
  Description of Artificial Sequence: Synthetic primer
tagaatctcatctcctgcgg

SEQ ID NO: 3371 - DNA, 20 bp, Artificial Sequence
  Description of Artificial Sequence: Synthetic primer
gtgtagccacatcaacctcc

SEQ ID NO: 3372 - DNA, 20 bp, Artificial Sequence
  Description of Artificial Sequence: Synthetic primer
ggtgatgaccactccacttc

SEQ ID NO: 3373 - DNA, 20 bp, Artificial Sequence
  Description of Artificial Sequence: Synthetic primer
ggttggtgtcttgaaggaga

SEQ ID NO: 3374 - DNA, 20 bp, Artificial Sequence
  Description of Artificial Sequence: Synthetic primer
ctcaacagtccacagccttt

SEQ ID NO: 3375 - DNA, 20 bp, Artificial Sequence
  Description of Artificial Sequence: Synthetic primer
aagaaacccccactctcatc

SEQ ID NO: 3376 - DNA, 20 bp, Artificial Sequence
  Description of Artificial Sequence: Synthetic primer
gcttgtgttgtggtggtgta

SEQ ID NO: 3377 - DNA, 20 bp, Artificial Sequence
  Description of Artificial Sequence: Synthetic primer
gatgagggagatctgtttgg

SEQ ID NO: 3378 - DNA, 19 bp, Artificial Sequence
  Description of Artificial Sequence: Synthetic primer
gggtgggtttgaaggagtt

SEQ ID NO: 3379 - DNA, 20 bp, Artificial Sequence
  Description of Artificial Sequence: Synthetic primer
ttgggtctggtactgttggt

SEQ ID NO: 3380 - DNA, 20 bp, Artificial Sequence
  Description of Artificial Sequence: Synthetic primer
cagcctaaaagatcccttcc

SEQ ID NO: 3381 - DNA, 20 bp, Artificial Sequence
  Description of Artificial Sequence: Synthetic primer
ggccaacaagttatgtgagg

SEQ ID NO: 3382 - DNA, 18 bp, Artificial Sequence
  Description of Artificial Sequence: Synthetic primer
caacacagcaccaccaaa

SEQ ID NO: 3383 - DNA, 20 bp, Artificial Sequence
  Description of Artificial Sequence: Synthetic primer
tggtctaacggtggttgagt

SEQ ID NO: 3384 - DNA, 20 bp, Artificial Sequence
  Description of Artificial Sequence: Synthetic primer
tgctgtgacgagaccaacta

SEQ ID NO: 3385 - DNA, 20 bp, Artificial Sequence
  Description of Artificial Sequence: Synthetic primer
cctctagtgcccatcaaaga

SEQ ID NO: 3386 - DNA, 20 bp, Artificial Sequence
  Description of Artificial Sequence: Synthetic primer
ctttggagtaccgaaacctg

SEQ ID NO: 3387 - DNA, 20 bp, Artificial Sequence
  Description of Artificial Sequence: Synthetic primer
ttcttgtgcggctacctatc

SEQ ID NO: 3388 - DNA, 20 bp, Artificial Sequence
  Description of Artificial Sequence: Synthetic primer
cgtgtctcccaatttacctg

SEQ ID NO: 3389 - DNA, 20 bp, Artificial Sequence
  Description of Artificial Sequence: Synthetic primer
ccatgtagaaagatccagcg

SEQ ID NO: 3390 - DNA, 20 bp, Artificial Sequence
  Description of Artificial Sequence: Synthetic primer
caacctcaacaaccatcctc

SEQ ID NO: 3391 - DNA, 20 bp, Artificial Sequence
  Description of Artificial Sequence: Synthetic primer
accaggatgtcagatgcagt

SEQ ID NO: 3392 - DNA, 20 bp, Artificial Sequence
  Description of Artificial Sequence: Synthetic primer
aacactaagcctcggttcct

SEQ ID NO: 3393 - DNA, 20 bp, Artificial Sequence
  Description of Artificial Sequence: Synthetic primer
aacaccaatcacctagagcg

SEQ ID NO: 3394 - DNA, 20 bp, Artificial Sequence
  Description of Artificial Sequence: Synthetic primer
gatgagggaagtgtggttga

SEQ ID NO: 3395 - DNA, 20 bp, Artificial Sequence
  Description of Artificial Sequence: Synthetic primer
gcataacaggaagagctcca

SEQ ID NO: 3396 - DNA, 20 bp, Artificial Sequence
  Description of Artificial Sequence: Synthetic primer
aggaatatgaagagggtggg

SEQ ID NO: 3397 - DNA, 20 bp, Artificial Sequence
  Description of Artificial Sequence: Synthetic primer
agtcccacatcagtgcaagt

SEQ ID NO: 3398 - DNA, 20 bp, Artificial Sequence
  Description of Artificial Sequence: Synthetic primer
agtcccacatcagtgcaagt

SEQ ID NO: 3399 - DNA, 20 bp, Artificial Sequence
  Description of Artificial Sequence: Synthetic primer
atcaaagttaccctctcggg

SEQ ID NO: 3400 - DNA, 20 bp, Artificial Sequence
  Description of Artificial Sequence: Synthetic primer
ataggtaccgggttttcagc

SEQ ID NO: 3401 - DNA, 20 bp, Artificial Sequence
  Description of Artificial Sequence: Synthetic primer
gggtgaagtatccctgcttt

SEQ ID NO: 3402 - DNA, 20 bp, Artificial Sequence
  Description of Artificial Sequence: Synthetic primer
acccgtgattgtctgttacg

SEQ ID NO: 3403 - DNA, 20 bp, Artificial Sequence
  Description of Artificial Sequence: Synthetic primer
tcggtactatccacctccaa

SEQ ID NO: 3404 - DNA, 22 bp, Artificial Sequence
  Description of Artificial Sequence: Synthetic primer
gaggagcagacttatctagcca

SEQ ID NO: 3405 - DNA, 20 bp, Artificial Sequence
  Description of Artificial Sequence: Synthetic primer
gaagtatgtctctgccgtgg

SEQ ID NO: 3406 - DNA, 20 bp, Artificial Sequence
  Description of Artificial Sequence: Synthetic primer
taatctgctcgtgccctaac

SEQ ID NO: 3407 - DNA, 18 bp, Artificial Sequence
  Description of Artificial Sequence: Synthetic primer
caggcttgtggtgatggt

SEQ ID NO: 3408 - DNA, 20 bp, Artificial Sequence
  Description of Artificial Sequence: Synthetic primer
gcgttaggttgtgaaagctc

SEQ ID NO: 3409 - DNA, 20 bp, Artificial Sequence
  Description of Artificial Sequence: Synthetic primer
gggcattcttttcaggagtc

SEQ ID NO: 3410 - DNA, 20 bp, Artificial Sequence
  Description of Artificial Sequence: Synthetic primer
catctgatattctggggcag

SEQ ID NO: 3411 - DNA, 18 bp, Artificial Sequence
  Description of Artificial Sequence: Synthetic primer
ccaacaacaccacccaac

SEQ ID NO: 3412 - DNA, 20 bp, Artificial Sequence
  Description of Artificial Sequence: Synthetic primer
aaaggttgtcttgtgggacc

SEQ ID NO: 3413 - DNA, 20 bp, Artificial Sequence
  Description of Artificial Sequence: Synthetic primer
gaaggagatgggttggtctt

SEQ ID NO: 3414 - DNA, 20 bp, Artificial Sequence
  Description of Artificial Sequence: Synthetic primer
atagcatgaaccacgagtcc

SEQ ID NO: 3415 - DNA, 20 bp, Artificial Sequence
  Description of Artificial Sequence: Synthetic primer
gtgtgctgctaaacgaaggt

SEQ ID NO: 3416 - DNA, 20 bp, Artificial Sequence
  Description of Artificial Sequence: Synthetic primer
gagaacatgttgggtgaagg

SEQ ID NO: 3417 - DNA, 20 bp, Artificial Sequence
  Description of Artificial Sequence: Synthetic primer
gcccagcagcatatacctta

SEQ ID NO: 3418 - DNA, 20 bp, Artificial Sequence
  Description of Artificial Sequence: Synthetic primer
ggtttggaaactggaggtct

SEQ ID NO: 3419 - DNA, 20 bp, Artificial Sequence
  Description of Artificial Sequence: Synthetic primer
aggtccgtgttttccctaac

SEQ ID NO: 3420 - DNA, 20 bp, Artificial Sequence
  Description of Artificial Sequence: Synthetic primer
gcagaagacggaagactttg

SEQ ID NO: 3421 - DNA, 20 bp, Artificial Sequence
  Description of Artificial Sequence: Synthetic primer
ccataaccaccacgtctctc

SEQ ID NO: 3422 - DNA, 20 bp, Artificial Sequence
  Description of Artificial Sequence: Synthetic primer
ccggcaaactgctaagtcta

SEQ ID NO: 3423 - DNA, 20 bp, Artificial Sequence
  Description of Artificial Sequence: Synthetic primer
acccgtgattgtctgttacg

SEQ ID NO: 3424 - DNA, 20 bp, Artificial Sequence
  Description of Artificial Sequence: Synthetic primer
gtggagagctcgaggtacaa

SEQ ID NO: 3425 - DNA, 20 bp, Artificial Sequence
  Description of Artificial Sequence: Synthetic primer
cagctgaacgttttctctcc

SEQ ID NO: 3426 - DNA, 20 bp, Artificial Sequence
  Description of Artificial Sequence: Synthetic primer
gaagcagagaaacctcctcc

SEQ ID NO: 3427 - DNA, 20 bp, Artificial Sequence
  Description of Artificial Sequence: Synthetic primer
cactagaaaccaatccaccg

SEQ ID NO: 3428 - DNA, 20 bp, Artificial Sequence
  Description of Artificial Sequence: Synthetic primer
atgaggagagagaggctggt

SEQ ID NO: 3429 - DNA, 20 bp, Artificial Sequence
  Description of Artificial Sequence: Synthetic primer
ccctaactttgctccctctc

SEQ ID NO: 3430 - DNA, 20 bp, Artificial Sequence
  Description of Artificial Sequence: Synthetic primer
ctggccagatctgtgtatcc

SEQ ID NO: 3431 - DNA, 18 bp, Artificial Sequence
  Description of Artificial Sequence: Synthetic primer
aaagatgggattccaggc

SEQ ID NO: 3432 - DNA, 20 bp, Artificial Sequence
  Description of Artificial Sequence: Synthetic primer
agctttaggaggagctttgg

SEQ ID NO: 3433 - DNA, 20 bp, Artificial Sequence
  Description of Artificial Sequence: Synthetic primer
ggaatgggagttcggttagt

SEQ ID NO: 3434 - DNA, 20 bp, Artificial Sequence
  Description of Artificial Sequence: Synthetic primer
taccctcctcagaccctacc

SEQ ID NO: 3435 - DNA, 20 bp, Artificial Sequence
  Description of Artificial Sequence: Synthetic primer
gtggtttggaggtgaaggat

SEQ ID NO: 3436 - DNA, 20 bp, Artificial Sequence
  Description of Artificial Sequence: Synthetic primer
tcgcgtgatctcttctgact

SEQ ID NO: 3437 - DNA, 20 bp, Artificial Sequence
  Description of Artificial Sequence: Synthetic primer
gaatacaactctccgaccga

SEQ ID NO: 3438 - DNA, 20 bp, Artificial Sequence
  Description of Artificial Sequence: Synthetic primer
acagtctcccacgtgtcatt

SEQ ID NO: 3439 - DNA, 20 bp, Artificial Sequence
  Description of Artificial Sequence: Synthetic primer
gccttcttccgtagctctct

SEQ ID NO: 3440 - DNA, 20 bp, Artificial Sequence
  Description of Artificial Sequence: Synthetic primer
gacttaagccccaattcctc

SEQ ID NO: 3441 - DNA, 18 bp, Artificial Sequence
  Description of Artificial Sequence: Synthetic primer
gaatgatcgattgcaggc

SEQ ID NO: 3442 - DNA, 20 bp, Artificial Sequence
  Description of Artificial Sequence: Synthetic primer
cacctccgtagtcttctcca

SEQ ID NO: 3443 - DNA, 20 bp, Artificial Sequence
  Description of Artificial Sequence: Synthetic primer
ctattcactcattccaccgc

SEQ ID NO: 3444 - DNA, 20 bp, Artificial Sequence
  Description of Artificial Sequence: Synthetic primer
gtgtggtagtgtgggtggat

SEQ ID NO: 3445 - DNA, 20 bp, Artificial Sequence
  Description of Artificial Sequence: Synthetic primer
aacgagctgcaatagctgac

SEQ ID NO: 3446 - DNA, 20 bp, Artificial Sequence
  Description of Artificial Sequence: Synthetic primer
ctcagtgtggttccaagacc

SEQ ID NO: 3447 - DNA, 20 bp, Artificial Sequence
  Description of Artificial Sequence: Synthetic primer
gtcgggattcatctctgcta

SEQ ID NO: 3448 - DNA, 20 bp, Artificial Sequence
  Description of Artificial Sequence: Synthetic primer
gtcactccgctttgaagttg

SEQ ID NO: 3449 - DNA, 20 bp, Artificial Sequence
  Description of Artificial Sequence: Synthetic primer
ggatatgttcagcaagtggc

SEQ ID NO: 3450 - DNA, 20 bp, Artificial Sequence
  Description of Artificial Sequence: Synthetic primer
gtgacgacggacgaattaac

SEQ ID NO: 3451 - DNA, 20 bp, Artificial Sequence
  Description of Artificial Sequence: Synthetic primer
agccctctgaaactgattcc

SEQ ID NO: 3452 - DNA, 20 bp, Artificial Sequence
  Description of Artificial Sequence: Synthetic primer
actgttgcttctgcttggac

SEQ ID NO: 3453 - DNA, 20 bp, Artificial Sequence
  Description of Artificial Sequence: Synthetic primer
taatccgtatgcactagccc

SEQ ID NO: 3454 - DNA, 20 bp, Artificial Sequence
  Description of Artificial Sequence: Synthetic primer
aaaacctccaagacctcacc

SEQ ID NO: 3455 - DNA, 20 bp, Artificial Sequence
  Description of Artificial Sequence: Synthetic primer
ggaattagctctgcctgatg

SEQ ID NO: 3456 - DNA, 20 bp, Artificial Sequence
  Description of Artificial Sequence: Synthetic primer
aatatcctccgctaacgctc

SEQ ID NO: 3457 - DNA, 20 bp, Artificial Sequence
  Description of Artificial Sequence: Synthetic primer
cttgtaacgggatcacaacc

SEQ ID NO: 3458 - DNA, 20 bp, Artificial Sequence
  Description of Artificial Sequence: Synthetic primer
tctctctccccctgagattt

SEQ ID NO: 3459 - DNA, 20 bp, Artificial Sequence
  Description of Artificial Sequence: Synthetic primer
actgactcaaccgcactctc

SEQ ID NO: 3460 - DNA, 20 bp, Artificial Sequence
  Description of Artificial Sequence: Synthetic primer
ggaagggaggagagtgagag

SEQ ID NO: 3461 - DNA, 20 bp, Artificial Sequence
  Description of Artificial Sequence: Synthetic primer
cgagctcttcatcttcctca

SEQ ID NO: 3462 - DNA, 20 bp, Artificial Sequence
  Description of Artificial Sequence: Synthetic primer
ctcatattccctcacaagcg

SEQ ID NO: 3463 - DNA, 20 bp, Artificial Sequence
  Description of Artificial Sequence: Synthetic primer
aagaccagcaagaccacaag

SEQ ID NO: 3464 - DNA, 20 bp, Artificial Sequence
  Description of Artificial Sequence: Synthetic primer
cgccttatcatgagaccttg

SEQ ID NO: 3465 - DNA, 20 bp, Artificial Sequence
  Description of Artificial Sequence: Synthetic primer
caggagctactccaccagaa

SEQ ID NO: 3466 - DNA, 20 bp, Artificial Sequence
  Description of Artificial Sequence: Synthetic primer
caaaccctccacttaaccct

SEQ ID NO: 3467 - DNA, 20 bp, Artificial Sequence
  Description of Artificial Sequence: Synthetic primer
gctcatcaaacagctcaggt

SEQ ID NO: 3468 - DNA, 20 bp, Artificial Sequence
  Description of Artificial Sequence: Synthetic primer
ggtgcagctgaactcgtatt

SEQ ID NO: 3469 - DNA, 20 bp, Artificial Sequence
  Description of Artificial Sequence: Synthetic primer
accttcactcacaaagctcg

SEQ ID NO: 3470 - DNA, 20 bp, Artificial Sequence
  Description of Artificial Sequence: Synthetic primer
ctaaaccgccacatctcact

SEQ ID NO: 3471 - DNA, 20 bp, Artificial Sequence
  Description of Artificial Sequence: Synthetic primer
gtgatggttcctatgatgcc

SEQ ID NO: 3472 - DNA, 20 bp, Artificial Sequence
  Description of Artificial Sequence: Synthetic primer
ccaggtacaaatcacgcaag

SEQ ID NO: 3473 - DNA, 20 bp, Artificial Sequence
  Description of Artificial Sequence: Synthetic primer
ctgagagaagcaagcactcc

SEQ ID NO: 3474 - DNA, 20 bp, Artificial Sequence
  Description of Artificial Sequence: Synthetic primer
gccttgagtctttgcttctg

SEQ ID NO: 3475 - DNA, 20 bp, Artificial Sequence
  Description of Artificial Sequence: Synthetic primer
tggtggtcttacttctgctg

SEQ ID NO: 3476 - DNA, 20 bp, Artificial Sequence
  Description of Artificial Sequence: Synthetic primer
gacatatcgtcctcattcgg

SEQ ID NO: 3477 - DNA, 20 bp, Artificial Sequence
  Description of Artificial Sequence: Synthetic primer
ataggtcgatcgtccctttc

SEQ ID NO: 3478 - DNA, 20 bp, Artificial Sequence
  Description of Artificial Sequence: Synthetic primer
tatcttctcttgcagcagcc

SEQ ID NO: 3479 - DNA, 20 bp, Artificial Sequence
  Description of Artificial Sequence: Synthetic primer
cagaaccagtaccccatacg

SEQ ID NO: 3480 - DNA, 20 bp, Artificial Sequence
  Description of Artificial Sequence: Synthetic primer
cactggccaatgtaagttcc

SEQ ID NO: 3481 - DNA, 20 bp, Artificial Sequence
  Description of Artificial Sequence: Synthetic primer
tgtttcttaggtactgcccg

SEQ ID NO: 3482 - DNA, 20 bp, Artificial Sequence
  Description of Artificial Sequence: Synthetic primer
gctacaagaccatcaccacc

SEQ ID NO: 3483 - DNA, 20 bp, Artificial Sequence
  Description of Artificial Sequence: Synthetic primer
gttgctgctgttgttgcttc

SEQ ID NO: 3484 - DNA, 20 bp, Artificial Sequence
  Description of Artificial Sequence: Synthetic primer
caggtggaacttgagcattg

SEQ ID NO: 3485 - DNA, 20 bp, Artificial Sequence
  Description of Artificial Sequence: Synthetic primer
ccagattcaccattagcagg

SEQ ID NO: 3486 - DNA, 20 bp, Artificial Sequence
  Description of Artificial Sequence: Synthetic primer
gaccaatggtgaagaaggtg

SEQ ID NO: 3487 - DNA, 20 bp, Artificial Sequence
  Description of Artificial Sequence: Synthetic primer
gtaacaacggccacataacc

SEQ ID NO: 3488 - DNA, 20 bp, Artificial Sequence
  Description of Artificial Sequence: Synthetic primer
ctttgttccttgtgctccac

SEQ ID NO: 3489 - DNA, 20 bp, Artificial Sequence
  Description of Artificial Sequence: Synthetic primer
cgtagccttcggttctatca

SEQ ID NO: 3490 - DNA, 20 bp, Artificial Sequence
  Description of Artificial Sequence: Synthetic primer
ttcttcccctgctgtaactg

SEQ ID NO: 3491 - DNA, 18 bp, Artificial Sequence
  Description of Artificial Sequence: Synthetic primer
gcactccattcaccttca

SEQ ID NO: 3492 - DNA, 20 bp, Artificial Sequence
  Description of Artificial Sequence: Synthetic primer
ggatccggttcatcatcttc

SEQ ID NO: 3493 - DNA, 20 bp, Artificial Sequence
  Description of Artificial Sequence: Synthetic primer
gctctattcggcctagatcc

SEQ ID NO: 3494 - DNA, 20 bp, Artificial Sequence
  Description of Artificial Sequence: Synthetic primer
ctctgcttcaaagaactcgc

SEQ ID NO: 3495 - DNA, 20 bp, Artificial Sequence
  Description of Artificial Sequence: Synthetic primer
cctccttttcatcgggatac

SEQ ID NO: 3496 - DNA, 18 bp, Artificial Sequence
  Description of Artificial Sequence: Synthetic primer
catccccaatcatctgtg

SEQ ID NO: 3497 - DNA, 20 bp, Artificial Sequence
  Description of Artificial Sequence: Synthetic primer
ggcttgttgtaacagccact

SEQ ID NO: 3498 - DNA, 20 bp, Artificial Sequence
  Description of Artificial Sequence: Synthetic primer
cgtaaaccaccacctgtttc

SEQ ID NO: 3499 - DNA, 20 bp, Artificial Sequence
  Description of Artificial Sequence: Synthetic primer
cttgaaggcacaggctacat

SEQ ID NO: 3500 - DNA, 20 bp, Artificial Sequence
  Description of Artificial Sequence: Synthetic primer
tcgtcttcttcgtcttcgtc

SEQ ID NO: 3501 - DNA, 20 bp, Artificial Sequence
  Description of Artificial Sequence: Synthetic primer
atcagaagcagagggacctt

SEQ ID NO: 3502 - DNA, 20 bp, Artificial Sequence
  Description of Artificial Sequence: Synthetic primer
ctccctgtaaactgccttca

SEQ ID NO: 3503 - DNA, 20 bp, Artificial Sequence
  Description of Artificial Sequence: Synthetic primer
aacaagaccacggttcacac

SEQ ID NO: 3504 - DNA, 20 bp, Artificial Sequence
  Description of Artificial Sequence: Synthetic primer
catcaaacccttcctacacg

SEQ ID NO: 3505 - DNA, 20 bp, Artificial Sequence
  Description of Artificial Sequence: Synthetic primer
aaagaaagggagacaggcac

SEQ ID NO: 3506 - DNA, 20 bp, Artificial Sequence
  Description of Artificial Sequence: Synthetic primer
gctgagaagaccagcagaag

SEQ ID NO: 3507 - DNA, 20 bp, Artificial Sequence
  Description of Artificial Sequence: Synthetic primer
gtcaatggcaacaagtcacc

SEQ ID NO: 3508 - DNA, 20 bp, Artificial Sequence
  Description of Artificial Sequence: Synthetic primer
acatccctcaaaccctcttc

SEQ ID NO: 3509 - DNA, 20 bp, Artificial Sequence
  Description of Artificial Sequence: Synthetic primer
agcatcctcttctcccttgt

SEQ ID NO: 3510 - DNA, 20 bp, Artificial Sequence
  Description of Artificial Sequence: Synthetic primer
agtagcaggaaaagggatgc

SEQ ID NO: 3511 - DNA, 20 bp, Artificial Sequence
  Description of Artificial Sequence: Synthetic primer
atcagcagcttctcaccatc

SEQ ID NO: 3512 - DNA, 20 bp, Artificial Sequence
  Description of Artificial Sequence: Synthetic primer
catgccagtataaaggtggg

SEQ ID NO: 3513 - DNA, 20 bp, Artificial Sequence
  Description of Artificial Sequence: Synthetic primer
ccggttagaccaaaacacac

SEQ ID NO: 3514 - DNA, 20 bp, Artificial Sequence
  Description of Artificial Sequence: Synthetic primer
catggtactgctgatggtca

SEQ ID NO: 3515 - DNA, 20 bp, Artificial Sequence
  Description of Artificial Sequence: Synthetic primer
aacacacagtccacaacacg

SEQ ID NO: 3516 - DNA, 20 bp, Artificial Sequence
  Description of Artificial Sequence: Synthetic primer
taacaggaggagcatgaagc

SEQ ID NO: 3517 - DNA, 20 bp, Artificial Sequence
  Description of Artificial Sequence: Synthetic primer
gacccgtgttttacaagtgg

SEQ ID NO: 3518 - DNA, 20 bp, Artificial Sequence
  Description of Artificial Sequence: Synthetic primer
tccttctgatcttgtggctc

SEQ ID NO: 3519 - DNA, 20 bp, Artificial Sequence
  Description of Artificial Sequence: Synthetic primer
gtggcagttctggagaatca

SEQ ID NO: 3520 - DNA, 20 bp, Artificial Sequence
  Description of Artificial Sequence: Synthetic primer
caccaccaagaattacggag

SEQ ID NO: 3521 - DNA, 20 bp, Artificial Sequence
  Description of Artificial Sequence: Synthetic primer
ttcctctggaatgtctgagc

SEQ ID NO: 3522 - DNA, 20 bp, Artificial Sequence
  Description of Artificial Sequence: Synthetic primer
gatccacactcaaccgaatc

SEQ ID NO: 3523 - DNA, 20 bp, Artificial Sequence
  Description of Artificial Sequence: Synthetic primer
ctctctccgatttcctctcc

SEQ ID NO: 3524 - DNA, 20 bp, Artificial Sequence
  Description of Artificial Sequence: Synthetic primer
gggacacgtagacagaccac

SEQ ID NO: 3525 - DNA, 20 bp, Artificial Sequence
  Description of Artificial Sequence: Synthetic primer
taatcacaagactccgcctc

SEQ ID NO: 3526 - DNA, 20 bp, Artificial Sequence
  Description of Artificial Sequence: Synthetic primer
tggcgtaagtagaggtggaa

SEQ ID NO: 3527 - DNA, 20 bp, Artificial Sequence
  Description of Artificial Sequence: Synthetic primer
gaggcttgaacaagtaacgg

SEQ ID NO: 3528 - DNA, 20 bp, Artificial Sequence
  Description of Artificial Sequence: Synthetic primer
tcttatactcatcctgcggc

SEQ ID NO: 3529 - DNA, 20 bp, Artificial Sequence
  Description of Artificial Sequence: Synthetic primer
cggtgtcaactacggtatcc

SEQ ID NO: 3530 - DNA, 20 bp, Artificial Sequence
  Description of Artificial Sequence: Synthetic primer
ggcctaaaagcggaagatac

SEQ ID NO: 3531 - DNA, 20 bp, Artificial Sequence
  Description of Artificial Sequence: Synthetic primer
gggtatcgaatcctcttcgt

SEQ ID NO: 3532 - DNA, 20 bp, Artificial Sequence
  Description of Artificial Sequence: Synthetic primer
tcagctgtttctcccttacg

SEQ ID NO: 3533 - DNA, 20 bp, Artificial Sequence
  Description of Artificial Sequence: Synthetic primer
tattctggagcgatgtagcc

SEQ ID NO: 3534 - DNA, 20 bp, Artificial Sequence
  Description of Artificial Sequence: Synthetic primer
cacgccaggtagagagacat

SEQ ID NO: 3535 - DNA, 20 bp, Artificial Sequence
  Description of Artificial Sequence: Synthetic primer
gagtgcagaaaccttggatg

SEQ ID NO: 3536 - DNA, 20 bp, Artificial Sequence
  Description of Artificial Sequence: Synthetic primer
acttcgtgaaggtggtgttg

SEQ ID NO: 3537 - DNA, 20 bp, Artificial Sequence
  Description of Artificial Sequence: Synthetic primer
ttatcggtggtagcagcagt

SEQ ID NO: 3538 - DNA, 20 bp, Artificial Sequence
  Description of Artificial Sequence: Synthetic primer
caatcgcctgaagagaagag

SEQ ID NO: 3539 - DNA, 20 bp, Artificial Sequence
  Description of Artificial Sequence: Synthetic primer
ccatggctaccttcctcata

SEQ ID NO: 3540 - DNA, 20 bp, Artificial Sequence
  Description of Artificial Sequence: Synthetic primer
gtccatgctcaccatcatct

SEQ ID NO: 3541 - DNA, 20 bp, Artificial Sequence
  Description of Artificial Sequence: Synthetic primer
ccgtgattaaccacatcctc

SEQ ID NO: 3542 - DNA, 20 bp, Artificial Sequence
  Description of Artificial Sequence: Synthetic primer
actcatctaacaccaccgga

SEQ ID NO: 3543 - DNA, 20 bp, Artificial Sequence
  Description of Artificial Sequence: Synthetic primer
gtgatcaggttcagtcccag

SEQ ID NO: 3544 - DNA, 20 bp, Artificial Sequence
  Description of Artificial Sequence: Synthetic primer
cacttaatgcgaggcgtagt

SEQ ID NO: 3545 - DNA, 20 bp, Artificial Sequence
  Description of Artificial Sequence: Synthetic primer
aaactcagataccgcgtgag

SEQ ID NO: 3546 - DNA, 20 bp, Artificial Sequence
  Description of Artificial Sequence: Synthetic primer
gaacccttgcccttacactt

SEQ ID NO: 3547 - DNA, 20 bp, Artificial Sequence
  Description of Artificial Sequence: Synthetic primer
cagatgcaatggtaagtccc

SEQ ID NO: 3548 - DNA, 20 bp, Artificial Sequence
  Description of Artificial Sequence: Synthetic primer
caccagcagtcatagaagca

SEQ ID NO: 3549 - DNA, 20 bp, Artificial Sequence
  Description of Artificial Sequence: Synthetic primer
atcagactcctcctgagcct

SEQ ID NO: 3550 - DNA, 20 bp, Artificial Sequence
  Description of Artificial Sequence: Synthetic primer
gccttaagcagctcactctg

SEQ ID NO: 3551 - DNA, 20 bp, Artificial Sequence
  Description of Artificial Sequence: Synthetic primer
cgataaccttactctcgcca

SEQ ID NO: 3552 - DNA, 20 bp, Artificial Sequence
  Description of Artificial Sequence: Synthetic primer
cgataaccttactctcgcca

SEQ ID NO: 3553 - DNA, 20 bp, Artificial Sequence
  Description of Artificial Sequence: Synthetic primer
gctacctccctggtgttttt

SEQ ID NO: 3554 - DNA, 20 bp, Artificial Sequence
  Description of Artificial Sequence: Synthetic primer
ggaccagtggaggtaggagt

SEQ ID NO: 3555 - DNA, 20 bp, Artificial Sequence
  Description of Artificial Sequence: Synthetic primer
tggtgtagggttcgatgagt

SEQ ID NO: 3556 - DNA, 20 bp, Artificial Sequence
  Description of Artificial Sequence: Synthetic primer
gaccgtactttctccaagca

SEQ ID NO: 3557 - DNA, 20 bp, Artificial Sequence
  Description of Artificial Sequence: Synthetic primer
gcagttgatccagcatctct

SEQ ID NO: 3558 - DNA, 20 bp, Artificial Sequence
  Description of Artificial Sequence: Synthetic primer
actctgccacttctttgctg

SEQ ID NO: 3559 - DNA, 20 bp, Artificial Sequence
  Description of Artificial Sequence: Synthetic primer
ctcacctctgcaagaaatgc

SEQ ID NO: 3560 - DNA, 20 bp, Artificial Sequence
  Description of Artificial Sequence: Synthetic primer
tattctagcccgtcttgtgg

SEQ ID NO: 3561 - DNA, 20 bp, Artificial Sequence
  Description of Artificial Sequence: Synthetic primer
gcgtaggatgaaacaccatc

SEQ ID NO: 3562 - DNA, 20 bp, Artificial Sequence
  Description of Artificial Sequence: Synthetic primer
ttagacgatctaacaggcgg

SEQ ID NO: 3563 - DNA, 20 bp, Artificial Sequence
  Description of Artificial Sequence: Synthetic primer
acttctcaaggccttcacct

SEQ ID NO: 3564 - DNA, 20 bp, Artificial Sequence
  Description of Artificial Sequence: Synthetic primer
cctggtgtgttgagaacctt

SEQ ID NO: 3565 - DNA, 20 bp, Artificial Sequence
  Description of Artificial Sequence: Synthetic primer
gtagatgttcggttgtcgct

SEQ ID NO: 3566 - DNA, 20 bp, Artificial Sequence
  Description of Artificial Sequence: Synthetic primer
aagattctccacaggttccc

SEQ ID NO: 3567 - DNA, 20 bp, Artificial Sequence
  Description of Artificial Sequence: Synthetic primer
tatccgacacaagcttctcc

SEQ ID NO: 3568 - DNA, 20 bp, Artificial Sequence
  Description of Artificial Sequence: Synthetic primer
ccaagagtcaaagagaccga

SEQ ID NO: 3569 - DNA, 20 bp, Artificial Sequence
  Description of Artificial Sequence: Synthetic primer
ccttcaccgactccacatac

SEQ ID NO: 3570 - DNA, 20 bp, Artificial Sequence
  Description of Artificial Sequence: Synthetic primer
gagtgcttgataagacccga

SEQ ID NO: 3571 - DNA, 20 bp, Artificial Sequence
  Description of Artificial Sequence: Synthetic primer
ggataagtgaccagcttcca

SEQ ID NO: 3572 - DNA, 20 bp, Artificial Sequence
  Description of Artificial Sequence: Synthetic primer
cttttcaccctgaccgttct

SEQ ID NO: 3573 - DNA, 20 bp, Artificial Sequence
  Description of Artificial Sequence: Synthetic primer
ttgcgatctcaagggagtag

SEQ ID NO: 3574 - DNA, 20 bp, Artificial Sequence
  Description of Artificial Sequence: Synthetic primer
caaaccgacaaggctaggta

SEQ ID NO: 3575 - DNA, 20 bp, Artificial Sequence
  Description of Artificial Sequence: Synthetic primer
gatccagaaacaggggaagt

SEQ ID NO: 3576 - DNA, 20 bp, Artificial Sequence
  Description of Artificial Sequence: Synthetic primer
gctgccaactctctctcaag

SEQ ID NO: 3577 - DNA, 20 bp, Artificial Sequence
  Description of Artificial Sequence: Synthetic primer
atccgcagtctcagtagacg

SEQ ID NO: 3578 - DNA, 20 bp, Artificial Sequence
  Description of Artificial Sequence: Synthetic primer
aagacgatttccctctcacc

SEQ ID NO: 3579 - DNA, 20 bp, Artificial Sequence
  Description of Artificial Sequence: Synthetic primer
tcaatggtgacaggttctcc

SEQ ID NO: 3580 - DNA, 20 bp, Artificial Sequence
  Description of Artificial Sequence: Synthetic primer
tcattggagtctgtccacct

SEQ ID NO: 3581 - DNA, 20 bp, Artificial Sequence
  Description of Artificial Sequence: Synthetic primer
gactgcatatgtggcatcac

SEQ ID NO: 3582 - DNA, 20 bp, Artificial Sequence
  Description of Artificial Sequence: Synthetic primer
caaagtggggtgcttgtaac

SEQ ID NO: 3583 - DNA, 20 bp, Artificial Sequence
  Description of Artificial Sequence: Synthetic primer
cacccacaaaacactactgc

SEQ ID NO: 3584 - DNA, 20 bp, Artificial Sequence
  Description of Artificial Sequence: Synthetic primer
tagcttctgctgagccttgt

SEQ ID NO: 3585 - DNA, 20 bp, Artificial Sequence
  Description of Artificial Sequence: Synthetic primer
tcatcttcatcgagctaggc

SEQ ID NO: 3586 - DNA, 20 bp, Artificial Sequence
  Description of Artificial Sequence: Synthetic primer
aagtcactcaaatcctcccc

SEQ ID NO: 3587 - DNA, 20 bp, Artificial Sequence
  Description of Artificial Sequence: Synthetic primer
caggcataccttgaacaacc

SEQ ID NO: 3588 - DNA, 20 bp, Artificial Sequence
  Description of Artificial Sequence: Synthetic primer
gccgtcatgtttgtatctcc

SEQ ID NO: 3589 - DNA, 20 bp, Artificial Sequence
  Description of Artificial Sequence: Synthetic primer
gttggatgtaacccaaccac

SEQ ID NO: 3590 - DNA, 20 bp, Artificial Sequence
  Description of Artificial Sequence: Synthetic primer
cggtcctcaagttcactagc

SEQ ID NO: 3591 - DNA, 20 bp, Artificial Sequence
  Description of Artificial Sequence: Synthetic primer
aagtgtaacgcctcagcaac

SEQ ID NO: 3592 - DNA, 20 bp, Artificial Sequence
  Description of Artificial Sequence: Synthetic primer
tcctcaagctctcatcatcc

SEQ ID NO: 3593 - DNA, 20 bp, Artificial Sequence
  Description of Artificial Sequence: Synthetic primer
cctaacccctaacccaactg

SEQ ID NO: 3594 - DNA, 20 bp, Artificial Sequence
  Description of Artificial Sequence: Synthetic primer
gattgggtgaccgtaacaag

SEQ ID NO: 3595 - DNA, 20 bp, Artificial Sequence
  Description of Artificial Sequence: Synthetic primer
ggcgtttaactgaggagtga

SEQ ID NO: 3596 - DNA, 20 bp, Artificial Sequence
  Description of Artificial Sequence: Synthetic primer
ctgacgtcatcatcaccgta

SEQ ID NO: 3597 - DNA, 20 bp, Artificial Sequence
  Description of Artificial Sequence: Synthetic primer
cagtcgggtaaatcttgtgg

SEQ ID NO: 3598 - DNA, 20 bp, Artificial Sequence
  Description of Artificial Sequence: Synthetic primer
agaatgcacgtccgaagtag

SEQ ID NO: 3599 - DNA, 20 bp, Artificial Sequence
  Description of Artificial Sequence: Synthetic primer
cagtgggaggtggtaatttg

SEQ ID NO: 3600 - DNA, 20 bp, Artificial Sequence
  Description of Artificial Sequence: Synthetic primer
gagtgagaaccgataagcca

SEQ ID NO: 3601 - DNA, 20 bp, Artificial Sequence
  Description of Artificial Sequence: Synthetic primer
catctaactgagccccctct

SEQ ID NO: 3602 - DNA, 20 bp, Artificial Sequence
  Description of Artificial Sequence: Synthetic primer
gctctgcttatcgtgatcgt

SEQ ID NO: 3603 - DNA, 20 bp, Artificial Sequence
  Description of Artificial Sequence: Synthetic primer
atttaggttaccagcgggag

SEQ ID NO: 3604 - DNA, 20 bp, Artificial Sequence
  Description of Artificial Sequence: Synthetic primer
actctggtgcattcagttcc

SEQ ID NO: 3605 - DNA, 20 bp, Artificial Sequence
  Description of Artificial Sequence: Synthetic primer
ggttccaagaggaaggagag

SEQ ID NO: 3606 - DNA, 20 bp, Artificial Sequence
  Description of Artificial Sequence: Synthetic primer
gacctccttcagatcaccct

SEQ ID NO: 3607 - DNA, 20 bp, Artificial Sequence
  Description of Artificial Sequence: Synthetic primer
taactctcttcaaccgccac

SEQ ID NO: 3608 - DNA, 20 bp, Artificial Sequence
  Description of Artificial Sequence: Synthetic primer
atctcagccgacacaacagt

SEQ ID NO: 3609 - DNA, 20 bp, Artificial Sequence
  Description of Artificial Sequence: Synthetic primer
tcctcaaacacttccgactc

SEQ ID NO: 3610 - DNA, 20 bp, Artificial Sequence
  Description of Artificial Sequence: Synthetic primer
catacgactggttcaccctc

SEQ ID NO: 3611 - DNA, 20 bp, Artificial Sequence
  Description of Artificial Sequence: Synthetic primer
tctttcttgtcctgtgggag

SEQ ID NO: 3612 - DNA, 20 bp, Artificial Sequence
  Description of Artificial Sequence: Synthetic primer
cacccacaaaacactactgc

SEQ ID NO: 3613 - DNA, 20 bp, Artificial Sequence
  Description of Artificial Sequence: Synthetic primer
gtctgcacctgccttacact

SEQ ID NO: 3614 - DNA, 20 bp, Artificial Sequence
  Description of Artificial Sequence: Synthetic primer
tgcaggaggagaagtgattc

SEQ ID NO: 3615 - DNA, 20 bp, Artificial Sequence
  Description of Artificial Sequence: Synthetic primer
cgctgataagggttagcttg

SEQ ID NO: 3616 - DNA, 20 bp, Artificial Sequence
  Description of Artificial Sequence: Synthetic primer
cctgatagtatccttccccg

SEQ ID NO: 3617 - DNA, 20 bp, Artificial Sequence
  Description of Artificial Sequence: Synthetic primer
tgaaaacacctcctactccg

SEQ ID NO: 3618 - DNA, 20 bp, Artificial Sequence
  Description of Artificial Sequence: Synthetic primer
actcatcgtacttgacccca

SEQ ID NO: 3619 - DNA, 20 bp, Artificial Sequence
  Description of Artificial Sequence: Synthetic primer
ttcacctctgagttgggtgt

SEQ ID NO: 3620 - DNA, 20 bp, Artificial Sequence
  Description of Artificial Sequence: Synthetic primer
gccatatccataacagacgc

SEQ ID NO: 3621 - DNA, 20 bp, Artificial Sequence
  Description of Artificial Sequence: Synthetic primer
ccctttcgacttccctgtat

SEQ ID NO: 3622 - DNA, 20 bp, Artificial Sequence
  Description of Artificial Sequence: Synthetic primer
agtggtggtgagatccattg

SEQ ID NO: 3623 - DNA, 20 bp, Artificial Sequence
  Description of Artificial Sequence: Synthetic primer
gatctgggtacaaacaaggg

SEQ ID NO: 3624 - DNA, 20 bp, Artificial Sequence
  Description of Artificial Sequence: Synthetic primer
gttggtgacttgtaaacccg

SEQ ID NO: 3625 - DNA, 20 bp, Artificial Sequence
  Description of Artificial Sequence: Synthetic primer
aaggtggtaactggtggtga

SEQ ID NO: 3626 - DNA, 20 bp, Artificial Sequence
  Description of Artificial Sequence: Synthetic primer
tctacacgaccgtcatctcc

SEQ ID NO: 3627 - DNA, 20 bp, Artificial Sequence
  Description of Artificial Sequence: Synthetic primer
gagtgcttgataagacccga

SEQ ID NO: 3628 - DNA, 20 bp, Artificial Sequence
  Description of Artificial Sequence: Synthetic primer
gcaccataaccgtaaccttg

SEQ ID NO: 3629 - DNA, 20 bp, Artificial Sequence
  Description of Artificial Sequence: Synthetic primer
acctctaagcgtcgtgagtg

SEQ ID NO: 3630 - DNA, 20 bp, Artificial Sequence
  Description of Artificial Sequence: Synthetic primer
cttggaacagaggttaagcg

SEQ ID NO: 3631 - DNA, 20 bp, Artificial Sequence
  Description of Artificial Sequence: Synthetic primer
agaacatcgtcccacaccta

SEQ ID NO: 3632 - DNA, 20 bp, Artificial Sequence
  Description of Artificial Sequence: Synthetic primer
gctggaagttcttgctgtgt

SEQ ID NO: 3633 - DNA, 20 bp, Artificial Sequence
  Description of Artificial Sequence: Synthetic primer
accttaagatgcccacacag

SEQ ID NO: 3634 - DNA, 20 bp, Artificial Sequence
  Description of Artificial Sequence: Synthetic primer
acctcgtaccatctccttcc

SEQ ID NO: 3635 - DNA, 20 bp, Artificial Sequence
  Description of Artificial Sequence: Synthetic primer
gctttcttctggaggtgtga

SEQ ID NO: 3636 - DNA, 20 bp, Artificial Sequence
  Description of Artificial Sequence: Synthetic primer
ggtgggtgttgggtatgtaa

SEQ ID NO: 3637 - DNA, 19 bp, Artificial Sequence
  Description of Artificial Sequence: Synthetic primer
cagctccattagcagcagg

SEQ ID NO: 3638 - DNA, 20 bp, Artificial Sequence
  Description of Artificial Sequence: Synthetic primer
cgaggaaagagaagaggagg

SEQ ID NO: 3639 - DNA, 20 bp, Artificial Sequence
  Description of Artificial Sequence: Synthetic primer
aagtctggtggtttcccttc

SEQ ID NO: 3640 - DNA, 20 bp, Artificial Sequence
  Description of Artificial Sequence: Synthetic primer
atggaacctacaccctcctc

SEQ ID NO: 3641 - DNA, 20 bp, Artificial Sequence
  Description of Artificial Sequence: Synthetic primer
acaagagcacgtccaatagc

SEQ ID NO: 3642 - DNA, 20 bp, Artificial Sequence
  Description of Artificial Sequence: Synthetic primer
ggaggaatggtgtgtgaaag

SEQ ID NO: 3643 - DNA, 20 bp, Artificial Sequence
  Description of Artificial Sequence: Synthetic primer
cagatcctgagcagcaattc

SEQ ID NO: 3644 - DNA, 20 bp, Artificial Sequence
  Description of Artificial Sequence: Synthetic primer
taacactggagcctaaacgc

SEQ ID NO: 3645 - DNA, 20 bp, Artificial Sequence
  Description of Artificial Sequence: Synthetic primer
gagaaccagaaagcaccgta

SEQ ID NO: 3646 - DNA, 20 bp, Artificial Sequence
  Description of Artificial Sequence: Synthetic primer
cacggagtgagtccagagat

SEQ ID NO: 3647 - DNA, 20 bp, Artificial Sequence
  Description of Artificial Sequence: Synthetic primer
ccagtggacttgttttgtgc

SEQ ID NO: 3648 - DNA, 20 bp, Artificial Sequence
  Description of Artificial Sequence: Synthetic primer
cggaaagacgactagatgga

SEQ ID NO: 3649 - DNA, 20 bp, Artificial Sequence
  Description of Artificial Sequence: Synthetic primer
ggatagcagggaccaaatct

SEQ ID NO: 3650 - DNA, 20 bp, Artificial Sequence
  Description of Artificial Sequence: Synthetic primer
ctggacaaatcccacagttc

SEQ ID NO: 3651 - DNA, 20 bp, Artificial Sequence
  Description of Artificial Sequence: Synthetic primer
accaagggatgaaggaagtc

SEQ ID NO: 3652 - DNA, 20 bp, Artificial Sequence
  Description of Artificial Sequence: Synthetic primer
aaaacagatggacctcctcc

SEQ ID NO: 3653 - DNA, 20 bp, Artificial Sequence
  Description of Artificial Sequence: Synthetic primer
gcatactatccgaccgctta

SEQ ID NO: 3654 - DNA, 20 bp, Artificial Sequence
  Description of Artificial Sequence: Synthetic primer
gcctaagacaccatcaccac

SEQ ID NO: 3655 - DNA, 20 bp, Artificial Sequence
  Description of Artificial Sequence: Synthetic primer
cgtcatcttcatcatcctcc

SEQ ID NO: 3656 - DNA, 20 bp, Artificial Sequence
  Description of Artificial Sequence: Synthetic primer
agggaagtcgtctccttgat

SEQ ID NO: 3657 - DNA, 20 bp, Artificial Sequence
  Description of Artificial Sequence: Synthetic primer
gatgtgaaagttggagaccg

SEQ ID NO: 3658 - DNA, 20 bp, Artificial Sequence
  Description of Artificial Sequence: Synthetic primer
gttatcaccgatcgcagaag

SEQ ID NO: 3659 - DNA, 20 bp, Artificial Sequence
  Description of Artificial Sequence: Synthetic primer
ggcatgtccacctatgaaag

SEQ ID NO: 3660 - DNA, 20 bp, Artificial Sequence
  Description of Artificial Sequence: Synthetic primer
aaggttggagtaagggatgg

SEQ ID NO: 3661 - DNA, 20 bp, Artificial Sequence
  Description of Artificial Sequence: Synthetic primer
ctcgccagtagaagcaaaac

SEQ ID NO: 3662 - DNA, 20 bp, Artificial Sequence
  Description of Artificial Sequence: Synthetic primer
gtgatcctgttgatgcgact

SEQ ID NO: 3663 - DNA, 20 bp, Artificial Sequence
  Description of Artificial Sequence: Synthetic primer
caccgtgtacttcccaaatc

SEQ ID NO: 3664 - DNA, 20 bp, Artificial Sequence
  Description of Artificial Sequence: Synthetic primer
tcctcaccatcatcctcact

SEQ ID NO: 3665 - DNA, 20 bp, Artificial Sequence
  Description of Artificial Sequence: Synthetic primer
gtgtcagtgtctcctccagc

SEQ ID NO: 3666 - DNA, 20 bp, Artificial Sequence
  Description of Artificial Sequence: Synthetic primer
caaacctgatctcctgctct

SEQ ID NO: 3667 - DNA, 20 bp, Artificial Sequence
  Description of Artificial Sequence: Synthetic primer
aggatcagcactggaagatg

SEQ ID NO: 3668 - DNA, 20 bp, Artificial Sequence
  Description of Artificial Sequence: Synthetic primer
aggggtttaggaaggtgatg

SEQ ID NO: 3669 - DNA, 20 bp, Artificial Sequence
  Description of Artificial Sequence: Synthetic primer
caaaccctgtgtttcactcc

SEQ ID NO: 3670 - DNA, 20 bp, Artificial Sequence
  Description of Artificial Sequence: Synthetic primer
cactgaaaccacctctccag

SEQ ID NO: 3671 - DNA, 20 bp, Artificial Sequence
  Description of Artificial Sequence: Synthetic primer
tcagctacggttgtctcctc

SEQ ID NO: 3672 - DNA, 20 bp, Artificial Sequence
  Description of Artificial Sequence: Synthetic primer
gatgacgggtcaacagtttc

SEQ ID NO: 3673 - DNA, 20 bp, Artificial Sequence
  Description of Artificial Sequence: Synthetic primer
tccagtagccgtaaagatcg

SEQ ID NO: 3674 - DNA, 20 bp, Artificial Sequence
  Description of Artificial Sequence: Synthetic primer
gcctttacacttggagcaga

SEQ ID NO: 3675 - DNA, 20 bp, Artificial Sequence
  Description of Artificial Sequence: Synthetic primer
atcacttcagcataggcagc

SEQ ID NO: 3676 - DNA, 20 bp, Artificial Sequence
  Description of Artificial Sequence: Synthetic primer
aaggtgtaggcaagtgcatc

SEQ ID NO: 3677 - DNA, 20 bp, Artificial Sequence
  Description of Artificial Sequence: Synthetic primer
actcctcagctcatcactcg

SEQ ID NO: 3678 - DNA, 20 bp, Artificial Sequence
  Description of Artificial Sequence: Synthetic primer
agttggtaccggagttgtga

SEQ ID NO: 3679 - DNA, 20 bp, Artificial Sequence
  Description of Artificial Sequence: Synthetic primer
ctctctcttgtctccccctc

SEQ ID NO: 3680 - DNA, 20 bp, Artificial Sequence
  Description of Artificial Sequence: Synthetic primer
ggggtgctataaaagacggt

SEQ ID NO: 3681 - DNA, 20 bp, Artificial Sequence
  Description of Artificial Sequence: Synthetic primer
ctccagaaacagagccttca

SEQ ID NO: 3682 - DNA, 20 bp, Artificial Sequence
  Description of Artificial Sequence: Synthetic primer
acctcccaattatcagcctc

SEQ ID NO: 3683 - DNA, 20 bp, Artificial Sequence
  Description of Artificial Sequence: Synthetic primer
cttcgtacacatccacgtca

SEQ ID NO: 3684 - DNA, 20 bp, Artificial Sequence
  Description of Artificial Sequence: Synthetic primer
cgcaaacctagacaactcag

SEQ ID NO: 3685 - DNA, 20 bp, Artificial Sequence
  Description of Artificial Sequence: Synthetic primer
gacaccatagatgacgaggg

SEQ ID NO: 3686 - DNA, 20 bp, Artificial Sequence
  Description of Artificial Sequence: Synthetic primer
ggagttgatgcagctaatgg

SEQ ID NO: 3687 - DNA, 20 bp, Artificial Sequence
  Description of Artificial Sequence: Synthetic primer
gaacaaacaccaacaccctc

SEQ ID NO: 3688 - DNA, 20 bp, Artificial Sequence
  Description of Artificial Sequence: Synthetic primer
tgcctctctgattccacttc

SEQ ID NO: 3689 - DNA, 20 bp, Artificial Sequence
  Description of Artificial Sequence: Synthetic primer
gcgaggtagaacgggagtat

SEQ ID NO: 3690 - DNA, 20 bp, Artificial Sequence
  Description of Artificial Sequence: Synthetic primer
cccttgacaaattctcctcc

SEQ ID NO: 3691 - DNA, 20 bp, Artificial Sequence
  Description of Artificial Sequence: Synthetic primer
ttagtaaggatcacgcggag

SEQ ID NO: 3692 - DNA, 20 bp, Artificial Sequence
  Description of Artificial Sequence: Synthetic primer
gccctcagcatcacttactt

SEQ ID NO: 3693 - DNA, 20 bp, Artificial Sequence
  Description of Artificial Sequence: Synthetic primer
ctgacgtcatcatcaccgta

SEQ ID NO: 3694 - DNA, 20 bp, Artificial Sequence
  Description of Artificial Sequence: Synthetic primer
actcccatcttccaacttcc

SEQ ID NO: 3695 - DNA, 20 bp, Artificial Sequence
  Description of Artificial Sequence: Synthetic primer
cacaacctttcttcaccagc

SEQ ID NO: 3696 - DNA, 20 bp, Artificial Sequence
  Description of Artificial Sequence: Synthetic primer
ctgactcttgaacccaagga

SEQ ID NO: 3697 - DNA, 20 bp, Artificial Sequence
  Description of Artificial Sequence: Synthetic primer
cacatcttccccaacatacc

SEQ ID NO: 3698 - DNA, 20 bp, Artificial Sequence
  Description of Artificial Sequence: Synthetic primer
aggttcttgcctacaaaggg

SEQ ID NO: 3699 - DNA, 20 bp, Artificial Sequence
  Description of Artificial Sequence: Synthetic primer
gattccgatggagtgaacag

SEQ ID NO: 3700 - DNA, 20 bp, Artificial Sequence
  Description of Artificial Sequence: Synthetic primer
aggaacagaacctctcggtc

SEQ ID NO: 3701 - DNA, 20 bp, Artificial Sequence
  Description of Artificial Sequence: Synthetic primer
ctgttggagttctgatcgct

SEQ ID NO: 3702 - DNA, 20 bp, Artificial Sequence
  Description of Artificial Sequence: Synthetic primer
agaggatgaacagaggggtc

SEQ ID NO: 3703 - DNA, 20 bp, Artificial Sequence
  Description of Artificial Sequence: Synthetic primer
tgacgctctgtgttgtcttc

SEQ ID NO: 3704 - DNA, 20 bp, Artificial Sequence
  Description of Artificial Sequence: Synthetic primer
ttatcgactcaaggtcgagg

SEQ ID NO: 3705 - DNA, 20 bp, Artificial Sequence
  Description of Artificial Sequence: Synthetic primer
ctctggtccatggcaactac

SEQ ID NO: 3706 - DNA, 20 bp, Artificial Sequence
  Description of Artificial Sequence: Synthetic primer
attctattgagagacccgcc

SEQ ID NO: 3707 - DNA, 20 bp, Artificial Sequence
  Description of Artificial Sequence: Synthetic primer
cataagagctgcccctgtaa

SEQ ID NO: 3708 - DNA, 20 bp, Artificial Sequence
  Description of Artificial Sequence: Synthetic primer
ggacataaacctgcacaagg

SEQ ID NO: 3709 - DNA, 20 bp, Artificial Sequence
  Description of Artificial Sequence: Synthetic primer
atagaacatcgcgtccgtag

SEQ ID NO: 3710 - DNA, 20 bp, Artificial Sequence
  Description of Artificial Sequence: Synthetic primer
ttctttgtcctccagctgtc

SEQ ID NO: 3711 - DNA, 20 bp, Artificial Sequence
  Description of Artificial Sequence: Synthetic primer
tgtgtgtacgaaccgtcaac

SEQ ID NO: 3712 - DNA, 20 bp, Artificial Sequence
  Description of Artificial Sequence: Synthetic primer
ccaccatgctcctttgtatc

SEQ ID NO: 3713 - DNA, 20 bp, Artificial Sequence
  Description of Artificial Sequence: Synthetic primer
ggcagtccagcagtaggata

SEQ ID NO: 3714 - DNA, 20 bp, Artificial Sequence
  Description of Artificial Sequence: Synthetic primer
gatcatgtctttgtcggagg

SEQ ID NO: 3715 - DNA, 20 bp, Artificial Sequence
  Description of Artificial Sequence: Synthetic primer
cacgtgtcttgattcgtgag

SEQ ID NO: 3716 - DNA, 18 bp, Artificial Sequence
  Description of Artificial Sequence: Synthetic primer
gcgtgccacatccttcta

SEQ ID NO: 3717 - DNA, 20 bp, Artificial Sequence
  Description of Artificial Sequence: Synthetic primer
cgatggacctccaataagtg

SEQ ID NO: 3718 - DNA, 20 bp, Artificial Sequence
  Description of Artificial Sequence: Synthetic primer
cgtggtagtcatcagggttc

SEQ ID NO: 3719 - DNA, 20 bp, Artificial Sequence
  Description of Artificial Sequence: Synthetic primer
ctttgtttcacctccaccac

SEQ ID NO: 3720 - DNA, 20 bp, Artificial Sequence
  Description of Artificial Sequence: Synthetic primer
cctgcatgtaaggtaagcgt

SEQ ID NO: 3721 - DNA, 20 bp, Artificial Sequence
  Description of Artificial Sequence: Synthetic primer
agtaaccgtttccttgtccc

SEQ ID NO: 3722 - DNA, 20 bp, Artificial Sequence
  Description of Artificial Sequence: Synthetic primer
actcagaactcgtgtcgctc

SEQ ID NO: 3723 - DNA, 20 bp, Artificial Sequence
  Description of Artificial Sequence: Synthetic primer
cccacataggctaagggttt

SEQ ID NO: 3724 - DNA, 20 bp, Artificial Sequence
  Description of Artificial Sequence: Synthetic primer
gaagaccttccttcggtctc

SEQ ID NO: 3725 - DNA, 20 bp, Artificial Sequence
  Description of Artificial Sequence: Synthetic primer
ctcagagatctcaatcccca

SEQ ID NO: 3726 - DNA, 20 bp, Artificial Sequence
  Description of Artificial Sequence: Synthetic primer
gatgatccctgttcgacttg

SEQ ID NO: 3727 - DNA, 20 bp, Artificial Sequence
  Description of Artificial Sequence: Synthetic primer
tgtctggtaaggattccagc

SEQ ID NO: 3728 - DNA, 20 bp, Artificial Sequence
  Description of Artificial Sequence: Synthetic primer
ctcaatgctaaacccacctg

SEQ ID NO: 3729 - DNA, 20 bp, Artificial Sequence
  Description of Artificial Sequence: Synthetic primer
tcgtcttaaactcggtgagg

SEQ ID NO: 3730 - DNA, 20 bp, Artificial Sequence
  Description of Artificial Sequence: Synthetic primer
gaccaagtgttgtgaaaggg

SEQ ID NO: 3731 - DNA, 20 bp, Artificial Sequence
  Description of Artificial Sequence: Synthetic primer
accatcatcgcatctctctc

SEQ ID NO: 3732 - DNA, 20 bp, Artificial Sequence
  Description of Artificial Sequence: Synthetic primer
gcagtcctattgcgagtgtt

SEQ ID NO: 3733 - DNA, 20 bp, Artificial Sequence
  Description of Artificial Sequence: Synthetic primer
agaggagactgaaccggagt

SEQ ID NO: 3734 - DNA, 20 bp, Artificial Sequence
  Description of Artificial Sequence: Synthetic primer
gacgaactagacgaaaccga

SEQ ID NO: 3735 - DNA, 20 bp, Artificial Sequence
  Description of Artificial Sequence: Synthetic primer
gacgaactagacgaaaccga

SEQ ID NO: 3736 - DNA, 19 bp, Artificial Sequence
  Description of Artificial Sequence: Synthetic primer
gcctgcctgctacgttaat

SEQ ID NO: 3737 - DNA, 20 bp, Artificial Sequence
  Description of Artificial Sequence: Synthetic primer
gaggcttgaacaagtaacgg

SEQ ID NO: 3738 - DNA, 20 bp, Artificial Sequence
  Description of Artificial Sequence: Synthetic primer
ctctctgtcgccggttatta

SEQ ID NO: 3739 - DNA, 20 bp, Artificial Sequence
  Description of Artificial Sequence: Synthetic primer
acatactgcgtcgtggtctc

SEQ ID NO: 3740 - DNA, 20 bp, Artificial Sequence
  Description of Artificial Sequence: Synthetic primer
catctgcgagtgatgagatg

SEQ ID NO: 3741 - DNA, 20 bp, Artificial Sequence
  Description of Artificial Sequence: Synthetic primer
ccgtagcacctaaagatgga

SEQ ID NO: 3742 - DNA, 20 bp, Artificial Sequence
  Description of Artificial Sequence: Synthetic primer
gaagacggattgagtggaga

SEQ ID NO: 3743 - DNA, 20 bp, Artificial Sequence
  Description of Artificial Sequence: Synthetic primer
acgacgagacgtttgttagc

SEQ ID NO: 3744 - DNA, 19 bp, Artificial Sequence
  Description of Artificial Sequence: Synthetic primer
gtagtggatcgggcatctt

SEQ ID NO: 3745 - DNA, 20 bp, Artificial Sequence
  Description of Artificial Sequence: Synthetic primer
gagtgttgtccagcgagatt

SEQ ID NO: 3746 - DNA, 20 bp, Artificial Sequence
  Description of Artificial Sequence: Synthetic primer
cttcagccaccaccaaatac

SEQ ID NO: 3747 - DNA, 20 bp, Artificial Sequence
  Description of Artificial Sequence: Synthetic primer
aacccttgtctcgaactcgt

SEQ ID NO: 3748 - DNA, 20 bp, Artificial Sequence
  Description of Artificial Sequence: Synthetic primer
agacgcaggttgtggtgtat

SEQ ID NO: 3749 - DNA, 20 bp, Artificial Sequence
  Description of Artificial Sequence: Synthetic primer
gatactccccgttaacacca

SEQ ID NO: 3750 - DNA, 20 bp, Artificial Sequence
  Description of Artificial Sequence: Synthetic primer
gctttgacatctggttggag

SEQ ID NO: 3751 - DNA, 20 bp, Artificial Sequence
  Description of Artificial Sequence: Synthetic primer
tagtcttcatgctcgaaccc

SEQ ID NO: 3752 - DNA, 20 bp, Artificial Sequence
  Description of Artificial Sequence: Synthetic primer
ggaggggagagagagatcag

SEQ ID NO: 3753 - DNA, 20 bp, Artificial Sequence
  Description of Artificial Sequence: Synthetic primer
tcggtcctcgctgttaatac

SEQ ID NO: 3754 - DNA, 20 bp, Artificial Sequence
  Description of Artificial Sequence: Synthetic primer
ccaacaccttctgcaactct

SEQ ID NO: 3755 - DNA, 20 bp, Artificial Sequence
  Description of Artificial Sequence: Synthetic primer
atccccatacccgtactcat

SEQ ID NO: 3756 - DNA, 20 bp, Artificial Sequence
  Description of Artificial Sequence: Synthetic primer
ggtcagtgtggtttcctttg

SEQ ID NO: 3757 - DNA, 20 bp, Artificial Sequence
  Description of Artificial Sequence: Synthetic primer
ggtcagtgtggtttcctttg

SEQ ID NO: 3758 - DNA, 20 bp, Artificial Sequence
  Description of Artificial Sequence: Synthetic primer
ctgctaaccggagaagacaa

SEQ ID NO: 3759 - DNA, 20 bp, Artificial Sequence
  Description of Artificial Sequence: Synthetic primer
cctggaaacacaacctcatc

SEQ ID NO: 3760 - DNA, 20 bp, Artificial Sequence
  Description of Artificial Sequence: Synthetic primer
gctttattcttctccccagc

SEQ ID NO: 3761 - DNA, 20 bp, Artificial Sequence
  Description of Artificial Sequence: Synthetic primer
tccttatcgcatgtagcctc

SEQ ID NO: 3762 - DNA, 20 bp, Artificial Sequence
  Description of Artificial Sequence: Synthetic primer
cctcgtaccatctctttcca

SEQ ID NO: 3763 - DNA, 24 bp, Parthenium argentatum
taataataataaccaccaccacca

SEQ ID NO: 3764 - DNA, 12 bp, Parthenium argentatum
atgatgatgatg

SEQ ID NO: 3765 - DNA, 45 bp, Parthenium argentatum
caccaccaccaccaccctcctcctcctcctcctcctcctcctcct

SEQ ID NO: 3766 - DNA, 15 bp, Parthenium argentatum
aataataataataat

SEQ ID NO: 3767 - DNA, 12 bp, Parthenium argentatum
atgatgatgatg

SEQ ID NO: 3768 - DNA, 14 bp, Parthenium argentatum
gagagagagagaga

SEQ ID NO: 3769 - DNA, 12 bp, Parthenium argentatum
atcatcatcatc

SEQ ID NO: 3770 - DNA, 16 bp, Parthenium argentatum
acacacacacacacac

SEQ ID NO: 3771 - DNA, 14 bp, Parthenium argentatum
atatatatatatat

SEQ ID NO: 3772 - DNA, 12 bp, Parthenium argentatum
attattattatt

SEQ ID NO: 3773 - DNA, 12 bp, Parthenium argentatum
tcatcatcatca

SEQ ID NO: 3774 - DNA, 12 bp, Parthenium argentatum
atgatgatgatg

SEQ ID NO: 3775 - DNA, 12 bp, Parthenium argentatum
ccaccaccacca

SEQ ID NO: 3776 - DNA, 12 bp, Parthenium argentatum
tctctctctctc

SEQ ID NO: 3777 - DNA, 12 bp, Parthenium argentatum
gctgctgctgct

SEQ ID NO: 3778 - DNA, 12 bp, Parthenium argentatum
cttcttcttctt

SEQ ID NO: 3779 - DNA, 12 bp, Parthenium argentatum
cttcttcttctt

SEQ ID NO: 3780 - DNA, 12 bp, Parthenium argentatum
tattattattat

SEQ ID NO: 3781 - DNA, 12 bp, Parthenium argentatum
cttcttcttctt

SEQ ID NO: 3782 - DNA, 12 bp, Parthenium argentatum
tactactactac

SEQ ID NO: 3783 - DNA, 15 bp, Parthenium argentatum
aggaggaggaggagg

SEQ ID NO: 3784 - DNA, 12 bp, Parthenium argentatum
ttattattatta

SEQ ID NO: 3785 - DNA, 12 bp, Parthenium argentatum
taataataataa

SEQ ID NO: 3786 - DNA, 12 bp, Parthenium argentatum
ataataataata

SEQ ID NO: 3787 - DNA, 15 bp, Parthenium argentatum
aagaagaagaagaag

SEQ ID NO: 3788 - DNA, 12 bp, Parthenium argentatum
tcgtcgtcgtcg

SEQ ID NO: 3789 - DNA, 12 bp, Parthenium argentatum
gatgatgatgat

SEQ ID NO: 3790 - DNA, 12 bp, Parthenium argentatum
gtggtggtggtg

SEQ ID NO: 3791 - DNA, 12 bp, Parthenium argentatum
aataataataat

SEQ ID NO: 3792 - DNA, 18 bp, Parthenium argentatum
gatgatgatgatgatgat

SEQ ID NO: 3793 - DNA, 12 bp, Parthenium argentatum
tgctgctgctgc

SEQ ID NO: 3794 - DNA, 12 bp, Parthenium argentatum
aagaagaagaag

SEQ ID NO: 3795 - DNA, 18 bp, Parthenium argentatum
tgatgatgatgatgatga

SEQ ID NO: 3796 - DNA, 15 bp, Parthenium argentatum
gatgatgatgatgat

SEQ ID NO: 3797 - DNA, 15 bp, Parthenium argentatum
ccaccaccaccacca

SEQ ID NO: 3798 - DNA, 24 bp, Parthenium argentatum
tgaggatgaggatgaggatgagga

SEQ ID NO: 3799 - DNA, 16 bp, Parthenium argentatum
ttgattgattgattga

SEQ ID NO: 3800 - DNA, 12 bp, Parthenium argentatum
ttattattatta

SEQ ID NO: 3801 - DNA, 21 bp, Parthenium argentatum
ggtggtggtggtggtggtggt

SEQ ID NO: 3802 - DNA, 12 bp, Parthenium argentatum
ccgccgccgccg

SEQ ID NO: 3803 - DNA, 15 bp, Parthenium argentatum
gaagaagaagaagaa

SEQ ID NO: 3804 - DNA, 12 bp, Parthenium argentatum
acacacacacac

SEQ ID NO: 3805 - DNA, 12 bp, Parthenium argentatum
tgctgctgctgc

SEQ ID NO: 3806 - DNA, 12 bp, Parthenium argentatum
cagcagcagcag

SEQ ID NO: 3807 - DNA, 15 bp, Parthenium argentatum
tgctgctgctgctgc

SEQ ID NO: 3808 - DNA, 15 bp, Parthenium argentatum
tcttcttcttcttct

SEQ ID NO: 3809 - DNA, 12 bp, Parthenium argentatum
ataataataata

SEQ ID NO: 3810 - DNA, 12 bp, Parthenium argentatum
attattattatt

SEQ ID NO: 3811 - DNA, 12 bp, Parthenium argentatum
atcatcatcatc

SEQ ID NO: 3812 - DNA, 12 bp, Parthenium argentatum
acaacaacaaca

SEQ ID NO: 3813 - DNA, 12 bp, Parthenium argentatum
accaccaccacc

SEQ ID NO: 3814 - DNA, 27 bp, Parthenium argentatum
gccgccgccgccgccgccgccgccgcc

SEQ ID NO: 3815 - DNA, 12 bp, Parthenium argentatum
aataataataat

SEQ ID NO: 3816 - DNA, 15 bp, Parthenium argentatum
aataataataataat

SEQ ID NO: 3817 - DNA, 12 bp, Parthenium argentatum
accaccaccacc

SEQ ID NO: 3818 - DNA, 12 bp, Parthenium argentatum
tgatgatgatga

SEQ ID NO: 3819 - DNA, 12 bp, Parthenium argentatum
atatatatatat

SEQ ID NO: 3820 - DNA, 12 bp, Parthenium argentatum
ttattattatta

SEQ ID NO: 3821 - DNA, 15 bp, Parthenium argentatum
tggtggtggtggtgg

SEQ ID NO: 3822 - DNA, 16 bp, Parthenium argentatum
cacacacacacacaca

SEQ ID NO: 3823 - DNA, 12 bp, Parthenium argentatum
taataataataa

SEQ ID NO: 3824 - DNA, 12 bp, Parthenium argentatum
aacaacaacaac

SEQ ID NO: 3825 - DNA, 12 bp, Parthenium argentatum
gctgctgctgct

SEQ ID NO: 3826 - DNA, 16 bp, Parthenium argentatum
gatagatagatagata

SEQ ID NO: 3827 - DNA, 12 bp, Parthenium argentatum
attattattatt

SEQ ID NO: 3828 - DNA, 12 bp, Parthenium argentatum
gaagaagaagaa

SEQ ID NO: 3829 - DNA, 15 bp, Parthenium argentatum
ttattattattatta

SEQ ID NO: 3830 - DNA, 12 bp, Parthenium argentatum
aagaagaagaag

SEQ ID NO: 3831 - DNA, 24 bp, Parthenium argentatum
gcaaacgcaaacgcaaacgcaaac

SEQ ID NO: 3832 - DNA, 18 bp, Parthenium argentatum
cttcttcttcttcttctt

SEQ ID NO: 3833 - DNA, 45 bp, Parthenium argentatum
gatgatgatgatgattagagatagagatagagatagagatagaga

SEQ ID NO: 3834 - DNA, 16 bp, Parthenium argentatum
tgtgtgtgtgtgtgtg

SEQ ID NO: 3835 - DNA, 12 bp, Parthenium argentatum
caccaccaccac

SEQ ID NO: 3836 - DNA, 15 bp, Parthenium argentatum
tattattattattat

SEQ ID NO: 3837 - DNA, 12 bp, Parthenium argentatum
aagaagaagaag

SEQ ID NO: 3838 - DNA, 12 bp, Parthenium argentatum
caccaccaccac

SEQ ID NO: 3839 - DNA, 15 bp, Parthenium argentatum
taataataataataa

SEQ ID NO: 3840 - DNA, 12 bp, Parthenium argentatum
tcgtcgtcgtcg

SEQ ID NO: 3841 - DNA, 16 bp, Parthenium argentatum
agagagagagagagag

SEQ ID NO: 3842 - DNA, 16 bp, Parthenium argentatum
cacgcacgcacgcacg

SEQ ID NO: 3843 - DNA, 15 bp, Parthenium argentatum
tgatgatgatgatga

SEQ ID NO: 3844 - DNA, 12 bp, Parthenium argentatum
gatgatgatgat

SEQ ID NO: 3845 - DNA, 12 bp, Parthenium argentatum
gatgatgatgat

SEQ ID NO: 3846 - DNA, 12 bp, Parthenium argentatum
ggtggtggtggt

SEQ ID NO: 3847 - DNA, 12 bp, Parthenium argentatum
acaacaacaaca

SEQ ID NO: 3848 - DNA, 12 bp, Parthenium argentatum
atgatgatgatg

SEQ ID NO: 3849 - DNA, 30 bp, Parthenium argentatum
cacacacacacacacacagaagaagaagaa

SEQ ID NO: 3850 - DNA, 12 bp, Parthenium argentatum
tctctctctctc

SEQ ID NO: 3851 - DNA, 15 bp, Parthenium argentatum
accaccaccaccacc

SEQ ID NO: 3852 - DNA, 18 bp, Parthenium argentatum
tagtagtagtagtagtag

SEQ ID NO: 3853 - DNA, 12 bp, Parthenium argentatum
aataataataat

SEQ ID NO: 3854 - DNA, 12 bp, Parthenium argentatum
gcagcagcagca

SEQ ID NO: 3855 - DNA, 12 bp, Parthenium argentatum
ctcctcctcctc

SEQ ID NO: 3856 - DNA, 12 bp, Parthenium argentatum
ttgttgttgttg

SEQ ID NO: 3857 - DNA, 12 bp, Parthenium argentatum
ttcttcttcttc

SEQ ID NO: 3858 - DNA, 15 bp, Parthenium argentatum
gaggaggaggaggag

SEQ ID NO: 3859 - DNA, 12 bp, Parthenium argentatum
attattattatt

SEQ ID NO: 3860 - DNA, 12 bp, Parthenium argentatum
cctcctcctcct

SEQ ID NO: 3861 - DNA, 24 bp, Parthenium argentatum
ttggtgttggtgttggtgttggtg

SEQ ID NO: 3862 - DNA, 18 bp, Parthenium argentatum
gtgtgtgtgtgtgtgtgt

SEQ ID NO: 3863 - DNA, 12 bp, Parthenium argentatum
tgttgttgttgt

SEQ ID NO: 3864 - DNA, 12 bp, Parthenium argentatum
ccaccaccacca

SEQ ID NO: 3865 - DNA, 12 bp, Parthenium argentatum
attaataataat

SEQ ID NO: 3866 - DNA, 15 bp, Parthenium argentatum
cagcagcagcagcag

SEQ ID NO: 3867 - DNA, 12 bp, Parthenium argentatum
aataataataat

SEQ ID NO: 3868 - DNA, 27 bp, Parthenium argentatum
caccaccaccaccacgatgatgatgat

SEQ ID NO: 3869 - DNA, 18 bp, Parthenium argentatum
gctgctgctgctgctgct

SEQ ID NO: 3870 - DNA, 12 bp, Parthenium argentatum
ataataataata

SEQ ID NO: 3871 - DNA, 12 bp, Parthenium argentatum
ataataataata

SEQ ID NO: 3872 - DNA, 16 bp, Parthenium argentatum
aacaaacaaacaaaca

SEQ ID NO: 3873 - DNA, 12 bp, Parthenium argentatum
ctgctgctgctg

SEQ ID NO: 3874 - DNA, 12 bp, Parthenium argentatum
taataataataa

SEQ ID NO: 3875 - DNA, 12 bp, Parthenium argentatum
tgctgctgctgc

SEQ ID NO: 3876 - DNA, 12 bp, Parthenium argentatum
catcatcatcat

SEQ ID NO: 3877 - DNA, 14 bp, Parthenium argentatum
tatatatatatata

SEQ ID NO: 3878 - DNA, 16 bp, Parthenium argentatum
tctctctctctctctc

SEQ ID NO: 3879 - DNA, 12 bp, Parthenium argentatum
atgatgatgatg

SEQ ID NO: 3880 - DNA, 12 bp, Parthenium argentatum
tggtggtggtgg

SEQ ID NO: 3881 - DNA, 12 bp, Parthenium argentatum
gaagaagaagaa

SEQ ID NO: 3882 - DNA, 24 bp, Parthenium argentatum
caatttcaatttcaatttcaattt

SEQ ID NO: 3883 - DNA, 18 bp, Parthenium argentatum
tgatgatgatgatgatga

SEQ ID NO: 3884 - DNA, 12 bp, Parthenium argentatum
tgttgttgttgt

SEQ ID NO: 3885 - DNA, 12 bp, Parthenium argentatum
tcctcctcctcc

SEQ ID NO: 3886 - DNA, 12 bp, Parthenium argentatum
tattattattat

SEQ ID NO: 3887 - DNA, 18 bp, Parthenium argentatum
caacaacaacaacaacaa

SEQ ID NO: 3888 - DNA, 12 bp, Parthenium argentatum
tcctcctcctcc

SEQ ID NO: 3889 - DNA, 24 bp, Parthenium argentatum
gattccgattccgattccgattcc

SEQ ID NO: 3890 - DNA, 24 bp, Parthenium argentatum
ggatcaggatcaggatcaggatca

SEQ ID NO: 3891 - DNA, 30 bp, Parthenium argentatum
ttacagttacagttacagttacagttacag

SEQ ID NO: 3892 - DNA, 12 bp, Parthenium argentatum
tcttcttcttct

SEQ ID NO: 3893 - DNA, 12 bp, Parthenium argentatum
ctctctctctct

SEQ ID NO: 3894 - DNA, 12 bp, Parthenium argentatum
caacaacaacaa

SEQ ID NO: 3895 - DNA, 18 bp, Parthenium argentatum
aacaacaacaacaacaac

SEQ ID NO: 3896 - DNA, 12 bp, Parthenium argentatum
ttattattatta

SEQ ID NO: 3897 - DNA, 12 bp, Parthenium argentatum
gtggtggtggtg

SEQ ID NO: 3898 - DNA, 12 bp, Parthenium argentatum
caccaccaccac

SEQ ID NO: 3899 - DNA, 12 bp, Parthenium argentatum
caccaccaccac

SEQ ID NO: 3900 - DNA, 15 bp, Parthenium argentatum
aataataataataat

SEQ ID NO: 3901 - DNA, 12 bp, Parthenium argentatum
ttcttcttcttc

SEQ ID NO: 3902 - DNA, 12 bp, Parthenium argentatum
tcttcttcttct

SEQ ID NO: 3903 - DNA, 15 bp, Parthenium argentatum
tcttcttcttcttct

SEQ ID NO: 3904 - DNA, 12 bp, Parthenium argentatum
catcatcatcat

SEQ ID NO: 3905 - DNA, 16 bp, Parthenium argentatum
caaacaaacaaacaaa

SEQ ID NO: 3906 - DNA, 12 bp, Parthenium argentatum
ttgttgttgttg

SEQ ID NO: 3907 - DNA, 12 bp, Parthenium argentatum
caacaacaacaa

SEQ ID NO: 3908 - DNA, 18 bp, Parthenium argentatum
ctctctctctctctctct

SEQ ID NO: 3909 - DNA, 12 bp, Parthenium argentatum
ctcctcctcctc

SEQ ID NO: 3910 - DNA, 12 bp, Parthenium argentatum
ggtggtggtggt

SEQ ID NO: 3911 - DNA, 15 bp, Parthenium argentatum
tcatcatcatcatca

SEQ ID NO: 3912 - DNA, 12 bp, Parthenium argentatum
gttgttgttgtt

SEQ ID NO: 3913 - DNA, 12 bp, Parthenium argentatum
ttattattatta

SEQ ID NO: 3914 - DNA, 12 bp, Parthenium argentatum
acaacaacaaca

SEQ ID NO: 3915 - DNA, 12 bp, Parthenium argentatum
caacaacaacaa

SEQ ID NO: 3916 - DNA, 12 bp, Parthenium argentatum
attattattatt

SEQ ID NO: 3917 - DNA, 12 bp, Parthenium argentatum
attattattatt

SEQ ID NO: 3918 - DNA, 24 bp, Parthenium argentatum
agttttagttttagttttagtttt

SEQ ID NO: 3919 - DNA, 24 bp, Parthenium argentatum
tggtggtggtggtgatgatgatga

SEQ ID NO: 3920 - DNA, 12 bp, Parthenium argentatum
cttcttcttctt

SEQ ID NO: 3921 - DNA, 12 bp, Parthenium argentatum
catcatcatcat

SEQ ID NO: 3922 - DNA, 12 bp, Parthenium argentatum
caccaccaccac

SEQ ID NO: 3923 - DNA, 27 bp, Parthenium argentatum
caacaacaacaacgacgacgacgacga

SEQ ID NO: 3924 - DNA, 12 bp, Parthenium argentatum
tcatcatcatca

SEQ ID NO: 3925 - DNA, 18 bp, Parthenium argentatum
aagaagaagaagaagaag

SEQ ID NO: 3926 - DNA, 12 bp, Parthenium argentatum
acacacacacac

SEQ ID NO: 3927 - DNA, 12 bp, Parthenium argentatum
tgtgtgtgtgtg

SEQ ID NO: 3928 - DNA, 12 bp, Parthenium argentatum
gaggaggaggag

SEQ ID NO: 3929 - DNA, 12 bp, Parthenium argentatum
ttcttcttcttc

SEQ ID NO: 3930 - DNA, 15 bp, Parthenium argentatum
tcttcttcttcttct

SEQ ID NO: 3931 - DNA, 12 bp, Parthenium argentatum
caccaccaccac

SEQ ID NO: 3932 - DNA, 12 bp, Parthenium argentatum
gctgctgctgct

SEQ ID NO: 3933 - DNA, 12 bp, Parthenium argentatum
aagaagaagaag

SEQ ID NO: 3934 - DNA, 15 bp, Parthenium argentatum
gtggtggtggtggtg

SEQ ID NO: 3935 - DNA, 15 bp, Parthenium argentatum
ataataataataata

SEQ ID NO: 3936 - DNA, 12 bp, Parthenium argentatum
gccgccgccgcc

SEQ ID NO: 3937 - DNA, 12 bp, Parthenium argentatum
atgatgatgatg

SEQ ID NO: 3938 - DNA, 15 bp, Parthenium argentatum
attattattattatt

SEQ ID NO: 3939 - DNA, 14 bp, Parthenium argentatum
tctctctctctctc

SEQ ID NO: 3940 - DNA, 27 bp, Parthenium argentatum
cagcagcagcagcagggtggtggtggt

SEQ ID NO: 3941 - DNA, 12 bp, Parthenium argentatum
aacaacaacaac

SEQ ID NO: 3942 - DNA, 12 bp, Parthenium argentatum
tcttcttcttct

SEQ ID NO: 3943 - DNA, 12 bp, Parthenium argentatum
agagagagagag

SEQ ID NO: 3944 - DNA, 27 bp, Parthenium argentatum
aagaagaagaagaagcatcatcatcat

SEQ ID NO: 3945 - DNA, 12 bp, Parthenium argentatum
caacaacaacaa

SEQ ID NO: 3946 - DNA, 14 bp, Parthenium argentatum
ctctctctctctct

SEQ ID NO: 3947 - DNA, 24 bp, Parthenium argentatum
aagaagaagaagcagcagcagcag

SEQ ID NO: 3948 - DNA, 12 bp, Parthenium argentatum
accaccaccacc

SEQ ID NO: 3949 - DNA, 15 bp, Parthenium argentatum
catcatcatcatcat

SEQ ID NO: 3950 - DNA, 16 bp, Parthenium argentatum
cttccttccttccttc

SEQ ID NO: 3951 - DNA, 12 bp, Parthenium argentatum
aagaagaagaag

SEQ ID NO: 3952 - DNA, 12 bp, Parthenium argentatum
cgacgacgacga

SEQ ID NO: 3953 - DNA, 30 bp, Parthenium argentatum
ataataataataataataaggaggaggagg

SEQ ID NO: 3954 - DNA, 16 bp, Parthenium argentatum
gtgtgtgtgtgtgtgt

SEQ ID NO: 3955 - DNA, 16 bp, Parthenium argentatum
gagagagagagagaga

SEQ ID NO: 3956 - DNA, 36 bp, Parthenium argentatum
gaagaagaagaatggtggtggtggtggtggtggtgg

SEQ ID NO: 3957 - DNA, 15 bp, Parthenium argentatum
aataataataataat

SEQ ID NO: 3958 - DNA, 15 bp, Parthenium argentatum
taataataataataa

SEQ ID NO: 3959 - DNA, 12 bp, Parthenium argentatum
ccaccaccacca

SEQ ID NO: 3960 - DNA, 12 bp, Parthenium argentatum
gaagaagaagaa

SEQ ID NO: 3961 - DNA, 12 bp, Parthenium argentatum
cagcagcagcag

SEQ ID NO: 3962 - DNA, 12 bp, Parthenium argentatum
tgctgctgctgc

SEQ ID NO: 3963 - DNA, 12 bp, Parthenium argentatum
cttcttcttctt

SEQ ID NO: 3964 - DNA, 12 bp, Parthenium argentatum
gatgatgatgat

SEQ ID NO: 3965 - DNA, 12 bp, Parthenium argentatum
taataataataa

SEQ ID NO: 3966 - DNA, 12 bp, Parthenium argentatum
tcatcatcatca

SEQ ID NO: 3967 - DNA, 12 bp, Parthenium argentatum
gtggtggtggtg

SEQ ID NO: 3968 - DNA, 15 bp, Parthenium argentatum
ccaccaccaccacca

SEQ ID NO: 3969 - DNA, 15 bp, Parthenium argentatum
tcttcttcttcttct

SEQ ID NO: 3970 - DNA, 18 bp, Parthenium argentatum
tactactactactactac

SEQ ID NO: 3971 - DNA, 18 bp, Parthenium argentatum
ctctctctctctctctct

SEQ ID NO: 3972 - DNA, 27 bp, Parthenium argentatum
taataataataataattattattatta

SEQ ID NO: 3973 - DNA, 12 bp, Parthenium argentatum
tgctgctgctgc

SEQ ID NO: 3974 - DNA, 15 bp, Parthenium argentatum
aagaagaagaagaag

SEQ ID NO: 3975 - DNA, 14 bp, Parthenium argentatum
ctctctctctctct

SEQ ID NO: 3976 - DNA, 12 bp, Parthenium argentatum
gaagaagaagaa

SEQ ID NO: 3977 - DNA, 12 bp, Parthenium argentatum
aacaacaacaac

SEQ ID NO: 3978 - DNA, 12 bp, Parthenium argentatum
tgctgctgctgc

SEQ ID NO: 3979 - DNA, 12 bp, Parthenium argentatum
agaagaagaaga

SEQ ID NO: 3980 - DNA, 12 bp, Parthenium argentatum
tctctctctctc

SEQ ID NO: 3981 - DNA, 15 bp, Parthenium argentatum
tcatcatcatcatca

SEQ ID NO: 3982 - DNA, 12 bp, Parthenium argentatum
tcttcttcttct

SEQ ID NO: 3983 - DNA, 12 bp, Parthenium argentatum
ccaccaccacca

SEQ ID NO: 3984 - DNA, 15 bp, Parthenium argentatum
ccaccaccaccacca

SEQ ID NO: 3985 - DNA, 15 bp, Parthenium argentatum
gatgatgatgatgat

SEQ ID NO: 3986 - DNA, 12 bp, Parthenium argentatum
atcatcatcatc

SEQ ID NO: 3987 - DNA, 27 bp, Parthenium argentatum
caccaccaccacctgctgctgctgctg

SEQ ID NO: 3988 - DNA, 14 bp, Parthenium argentatum
agagagagagagag

SEQ ID NO: 3989 - DNA, 12 bp, Parthenium argentatum
tgatgatgatga

SEQ ID NO: 3990 - DNA, 12 bp, Parthenium argentatum
agaagaagaaga

SEQ ID NO: 3991 - DNA, 12 bp, Parthenium argentatum
ggtggtggtggt

SEQ ID NO: 3992 - DNA, 12 bp, Parthenium argentatum
ggtggtggtggt

SEQ ID NO: 3993 - DNA, 12 bp, Parthenium argentatum
tggtggtggtgg

SEQ ID NO: 3994 - DNA, 12 bp, Parthenium argentatum
ttcttcttcttc

SEQ ID NO: 3995 - DNA, 12 bp, Parthenium argentatum
agaagaagaaga

SEQ ID NO: 3996 - DNA, 15 bp, Parthenium argentatum
tcttcttcttcttct

SEQ ID NO: 3997 - DNA, 12 bp, Parthenium argentatum
tcttcttcttct

SEQ ID NO: 3998 - DNA, 15 bp, Parthenium argentatum
aacaacaacaacaac

SEQ ID NO: 3999 - DNA, 15 bp, Parthenium argentatum
gaagaagaagaagaa

SEQ ID NO: 4000 - DNA, 12 bp, Parthenium argentatum
gaagaagaagaa

SEQ ID NO: 4001 - DNA, 12 bp, Parthenium argentatum
catcatcatcat

SEQ ID NO: 4002 - DNA, 12 bp, Parthenium argentatum
acacacacacac

SEQ ID NO: 4003 - DNA, 12 bp, Parthenium argentatum
agtagtagtagt

SEQ ID NO: 4004 - DNA, 16 bp, Parthenium argentatum
caatcaatcaatcaat

SEQ ID NO: 4005 - DNA, 12 bp, Parthenium argentatum
caacaacaacaa

SEQ ID NO: 4006 - DNA, 12 bp, Parthenium argentatum
ataataataata

SEQ ID NO: 4007 - DNA, 12 bp, Parthenium argentatum
atgatgatgatg

SEQ ID NO: 4008 - DNA, 12 bp, Parthenium argentatum
aagaagaagaag

SEQ ID NO: 4009 - DNA, 12 bp, Parthenium argentatum
aagaagaagaag

SEQ ID NO: 4010 - DNA, 12 bp, Parthenium argentatum
gttgttgttgtt

SEQ ID NO: 4011 - DNA, 12 bp, Parthenium argentatum
atgatgatgatg

SEQ ID NO: 4012 - DNA, 39 bp, Parthenium argentatum
acaacaacaacaaacaacaacaacaacaacaacaacaac

SEQ ID NO: 4013 - DNA, 24 bp, Parthenium argentatum
acaaacacaaacacaaacacaaac

SEQ ID NO: 4014 - DNA, 15 bp, Parthenium argentatum
gctgctgctgctgct

SEQ ID NO: 4015 - DNA, 12 bp, Parthenium argentatum
caccaccaccac

SEQ ID NO: 4016 - DNA, 12 bp, Parthenium argentatum
accaccaccacc

SEQ ID NO: 4017 - DNA, 18 bp, Parthenium argentatum
tgctgctgctgctgctgc

SEQ ID NO: 4018 - DNA, 12 bp, Parthenium argentatum
gctgctgctgct

SEQ ID NO: 4019 - DNA, 12 bp, Parthenium argentatum
tcgtcgtcgtcg

SEQ ID NO: 4020 - DNA, 16 bp, Parthenium argentatum
tgtgtgtgtgtgtgtg

SEQ ID NO: 4021 - DNA, 18 bp, Parthenium argentatum
ctctctctctctctctct

SEQ ID NO: 4022 - DNA, 14 bp, Parthenium argentatum
gagagagagagaga

SEQ ID NO: 4023 - DNA, 12 bp, Parthenium argentatum
cggcggcggcgg

SEQ ID NO: 4024 - DNA, 15 bp, Parthenium argentatum
ctgctgctgctgctg

SEQ ID NO: 4025 - DNA, 12 bp, Parthenium argentatum
ggtggtggtggt

SEQ ID NO: 4026 - DNA, 12 bp, Parthenium argentatum
ctgctgctgctg

SEQ ID NO: 4027 - DNA, 18 bp, Parthenium argentatum
agagagagagagagagag

SEQ ID NO: 4028 - DNA, 12 bp, Parthenium argentatum
tatatatatata

SEQ ID NO: 4029 - DNA, 12 bp, Parthenium argentatum
cagcagcagcag

SEQ ID NO: 4030 - DNA, 15 bp, Parthenium argentatum
atgatgatgatgatg

SEQ ID NO: 4031 - DNA, 12 bp, Parthenium argentatum
tggtggtggtgg

SEQ ID NO: 4032 - DNA, 12 bp, Parthenium argentatum
taataataataa

SEQ ID NO: 4033 - DNA, 12 bp, Parthenium argentatum
tgatgatgatga

SEQ ID NO: 4034 - DNA, 15 bp, Parthenium argentatum
tcctcctcctcctcc

SEQ ID NO: 4035 - DNA, 12 bp, Parthenium argentatum
gttgttgttgtt

SEQ ID NO: 4036 - DNA, 12 bp, Parthenium argentatum
tgatgatgatga

SEQ ID NO: 4037 - DNA, 12 bp, Parthenium argentatum
gaagaagaagaa

SEQ ID NO: 4038 - DNA, 8 bp, Parthenium argentatum
ctctctct

SEQ ID NO: 4039 - DNA, 12 bp, Parthenium argentatum
acaacaacaaca

SEQ ID NO: 4040 - DNA, 15 bp, Parthenium argentatum
tattattattattat

SEQ ID NO: 4041 - DNA, 14 bp, Parthenium argentatum
tctctctctctctc

SEQ ID NO: 4042 - DNA, 12 bp, Parthenium argentatum
gcagcagcagca

SEQ ID NO: 4043 - DNA, 30 bp, Parthenium argentatum
tgatgatgatgatgaaataataataataat

SEQ ID NO: 4044 - DNA, 12 bp, Parthenium argentatum
atcatcatcatc

SEQ ID NO: 4045 - DNA, 15 bp, Parthenium argentatum
tcatcatcatcatca

SEQ ID NO: 4046 - DNA, 15 bp, Parthenium argentatum
gatgatgatgatgat

SEQ ID NO: 4047 - DNA, 12 bp, Parthenium argentatum
tcttcttcttct

SEQ ID NO: 4048 - DNA, 12 bp, Parthenium argentatum
tggtggtggtgg

SEQ ID NO: 4049 - DNA, 12 bp, Parthenium argentatum
tctctctctctc

SEQ ID NO: 4050 - DNA, 18 bp, Parthenium argentatum
ataataataataataata

SEQ ID NO: 4051 - DNA, 12 bp, Parthenium argentatum
tcatcatcatca

SEQ ID NO: 4052 - DNA, 15 bp, Parthenium argentatum
cctcctcctcctcct

SEQ ID NO: 4053 - DNA, 15 bp, Parthenium argentatum
ttattattattatta

SEQ ID NO: 4054 - DNA, 12 bp, Parthenium argentatum
ggtggtggtggt

SEQ ID NO: 4055 - DNA, 12 bp, Parthenium argentatum
ccaccaccacca

SEQ ID NO: 4056 - DNA, 12 bp, Parthenium argentatum
ataataataata

SEQ ID NO: 4057 - DNA, 18 bp, Parthenium argentatum
agagagagagagagagag

SEQ ID NO: 4058 - DNA, 12 bp, Parthenium argentatum
gagagagagaga

SEQ ID NO: 4059 - DNA, 15 bp, Parthenium argentatum
aacaacaacaacaac

SEQ ID NO: 4060 - DNA, 16 bp, Parthenium argentatum
acttacttacttactt

SEQ ID NO: 4061 - DNA, 15 bp, Parthenium argentatum
tggtggtggtggtgg

SEQ ID NO: 4062 - DNA, 12 bp, Parthenium argentatum
tcttcttcttct

SEQ ID NO: 4063 - DNA, 15 bp, Parthenium argentatum
gcagcagcagcagca

SEQ ID NO: 4064 - DNA, 12 bp, Parthenium argentatum
caacaacaacaa

SEQ ID NO: 4065 - DNA, 12 bp, Parthenium argentatum
tcctcctcctcc

SEQ ID NO: 4066 - DNA, 15 bp, Parthenium argentatum
tcatcatcatcatca

SEQ ID NO: 4067 - DNA, 12 bp, Parthenium argentatum
acaacaacaaca

SEQ ID NO: 4068 - DNA, 15 bp, Parthenium argentatum
gatgatgatgatgat

SEQ ID NO: 4069 - DNA, 12 bp, Parthenium argentatum
aacaacaacaac

SEQ ID NO: 4070 - DNA, 39 bp, Parthenium argentatum
caccaccaccaccactcagactcagactcagactcagac

SEQ ID NO: 4071 - DNA, 12 bp, Parthenium argentatum
actactactact

SEQ ID NO: 4072 - DNA, 12 bp, Parthenium argentatum
gtggtggtggtg

SEQ ID NO: 4073 - DNA, 14 bp, Parthenium argentatum
tctctctctctctc

SEQ ID NO: 4074 - DNA, 12 bp, Parthenium argentatum
cttcttcttctt

SEQ ID NO: 4075 - DNA, 12 bp, Parthenium argentatum
tgctgctgctgc

SEQ ID NO: 4076 - DNA, 15 bp, Parthenium argentatum
taataataataataa

SEQ ID NO: 4077 - DNA, 18 bp, Parthenium argentatum
ataataataataataata

SEQ ID NO: 4078 - DNA, 12 bp, Parthenium argentatum
atcatcatcatc

SEQ ID NO: 4079 - DNA, 12 bp, Parthenium argentatum
atcatcatcatc

SEQ ID NO: 4080 - DNA, 12 bp, Parthenium argentatum
tgtgtgtgtgtg

SEQ ID NO: 4081 - DNA, 12 bp, Parthenium argentatum
aacaacaacaac

SEQ ID NO: 4082 - DNA, 15 bp, Parthenium argentatum
aataataataataat

SEQ ID NO: 4083 - DNA, 12 bp, Parthenium argentatum
acaacaacaaca

SEQ ID NO: 4084 - DNA, 15 bp, Parthenium argentatum
catcatcatcatcat

SEQ ID NO: 4085 - DNA, 12 bp, Parthenium argentatum
taataataataa

SEQ ID NO: 4086 - DNA, 12 bp, Parthenium argentatum
gatgatgatgat

SEQ ID NO: 4087 - DNA, 31 bp, Parthenium argentatum
tctctctctctctctccaccaccaccaccac

SEQ ID NO: 4088 - DNA, 12 bp, Parthenium argentatum
tgatgatgatga

SEQ ID NO: 4089 - DNA, 12 bp, Parthenium argentatum
atgatgatgatg

SEQ ID NO: 4090 - DNA, 18 bp, Parthenium argentatum
acaacaacaacaacaaca

SEQ ID NO: 4091 - DNA, 12 bp, Parthenium argentatum
ctgctgctgctg

SEQ ID NO: 4092 - DNA, 12 bp, Parthenium argentatum
aacaacaacaac

SEQ ID NO: 4093 - DNA, 15 bp, Parthenium argentatum
tgatgatgatgatga

SEQ ID NO: 4094 - DNA, 12 bp, Parthenium argentatum
tgatgatgatga

SEQ ID NO: 4095 - DNA, 12 bp, Parthenium argentatum
caacaacaacaa

SEQ ID NO: 4096 - DNA, 24 bp, Parthenium argentatum
caacaacaacaacagcagcagcag

SEQ ID NO: 4097 - DNA, 12 bp, Parthenium argentatum
tctctctctctc

SEQ ID NO: 4098 - DNA, 12 bp, Parthenium argentatum
gaggaggaggag

SEQ ID NO: 4099 - DNA, 12 bp, Parthenium argentatum
ccaccaccacca

SEQ ID NO: 4100 - DNA, 12 bp, Parthenium argentatum
cggcggcggcgg

SEQ ID NO: 4101 - DNA, 27 bp, Parthenium argentatum
ctctctctctctttattattattatta

SEQ ID NO: 4102 - DNA, 12 bp, Parthenium argentatum
ttattattatta

SEQ ID NO: 4103 - DNA, 12 bp, Parthenium argentatum
ggtggtggtggt

SEQ ID NO: 4104 - DNA, 16 bp, Parthenium argentatum
ccatccatccatccat

SEQ ID NO: 4105 - DNA, 16 bp, Parthenium argentatum
tgtgtgtgtgtgtgtg

SEQ ID NO: 4106 - DNA, 21 bp, Parthenium argentatum
tcctcctcctcctcctcctcc

SEQ ID NO: 4107 - DNA, 15 bp, Parthenium argentatum
aataataataataat

SEQ ID NO: 4108 - DNA, 12 bp, Parthenium argentatum
tgttgttgttgt

SEQ ID NO: 4109 - DNA, 15 bp, Parthenium argentatum
attattattattatt

SEQ ID NO: 4110 - DNA, 14 bp, Parthenium argentatum
agagagagagagag

SEQ ID NO: 4111 - DNA, 18 bp, Parthenium argentatum
tcctcctcctcctcctcc

SEQ ID NO: 4112 - DNA, 27 bp, Parthenium argentatum
ccaccaccaccaccacaccaccaccac

SEQ ID NO: 4113 - DNA, 15 bp, Parthenium argentatum
gaagaagaagaagaa

SEQ ID NO: 4114 - DNA, 12 bp, Parthenium argentatum
ccaccaccacca

SEQ ID NO: 4115 - DNA, 12 bp, Parthenium argentatum
aacaacaacaac

SEQ ID NO: 4116 - DNA, 12 bp, Parthenium argentatum
ttattattatta

SEQ ID NO: 4117 - DNA, 12 bp, Parthenium argentatum
tgatgatgatga

SEQ ID NO: 4118 - DNA, 14 bp, Parthenium argentatum
ctctctctctctct

SEQ ID NO: 4119 - DNA, 12 bp, Parthenium argentatum
ctgctgctgctg

SEQ ID NO: 4120 - DNA, 15 bp, Parthenium argentatum
cttcttcttcttctt

SEQ ID NO: 4121 - DNA, 38 bp, Parthenium argentatum
ttattattattattattattattaacacacacacacac

SEQ ID NO: 4122 - DNA, 12 bp, Parthenium argentatum
ggaggaggagga

SEQ ID NO: 4123 - DNA, 12 bp, Parthenium argentatum
ttgttgttgttg

SEQ ID NO: 4124 - DNA, 12 bp, Parthenium argentatum
acaacaacaaca

SEQ ID NO: 4125 - DNA, 12 bp, Parthenium argentatum
gctgctgctgct

SEQ ID NO: 4126 - DNA, 15 bp, Parthenium argentatum
agaagaagaagaaga

SEQ ID NO: 4127 - DNA, 12 bp, Parthenium argentatum
gaggaggaggag

SEQ ID NO: 4128 - DNA, 12 bp, Parthenium argentatum
gctgctgctgct

SEQ ID NO: 4129 - DNA, 27 bp, Parthenium argentatum
tcatcatcatcacatcatcatcatcat

SEQ ID NO: 4130 - DNA, 24 bp, Parthenium argentatum
gaaatggaaatggaaatggaaatg

SEQ ID NO: 4131 - DNA, 12 bp, Parthenium argentatum
aataataataat

SEQ ID NO: 4132 - DNA, 12 bp, Parthenium argentatum
ttgttgttgttg

SEQ ID NO: 4133 - DNA, 15 bp, Parthenium argentatum
ggaggaggaggagga

SEQ ID NO: 4134 - DNA, 12 bp, Parthenium argentatum
aagaagaagaag

SEQ ID NO: 4135 - DNA, 12 bp, Parthenium argentatum
aataataataat

SEQ ID NO: 4136 - DNA, 12 bp, Parthenium argentatum
gaagaagaagaa

SEQ ID NO: 4137 - DNA, 24 bp, Parthenium argentatum
tcatcttcatcttcatcttcatct

SEQ ID NO: 4138 - DNA, 12 bp, Parthenium argentatum
ttcttcttcttc

SEQ ID NO: 4139 - DNA, 12 bp, Parthenium argentatum
caccaccaccac

SEQ ID NO: 4140 - DNA, 12 bp, Parthenium argentatum
ccaccaccacca

SEQ ID NO: 4141 - DNA, 12 bp, Parthenium argentatum
ctctctctctct

SEQ ID NO: 4142 - DNA, 12 bp, Parthenium argentatum
taataataataa

SEQ ID NO: 4143 - DNA, 12 bp, Parthenium argentatum
ggtggtggtggt

SEQ ID NO: 4144 - DNA, 12 bp, Parthenium argentatum
acacacacacac

SEQ ID NO: 4145 - DNA, 12 bp, Parthenium argentatum
ataataataata

SEQ ID NO: 4146 - DNA, 12 bp, Parthenium argentatum
tcttcttcttct

SEQ ID NO: 4147 - DNA, 18 bp, Parthenium argentatum
attattattattattatt

SEQ ID NO: 4148 - DNA, 12 bp, Parthenium argentatum
gcagcagcagca

SEQ ID NO: 4149 - DNA, 18 bp, Parthenium argentatum
tgtgtgtgtgtgtgtgtg

SEQ ID NO: 4150 - DNA, 27 bp, Parthenium argentatum
ttcttcttcttcttctcatcatcatca

SEQ ID NO: 4151 - DNA, 12 bp, Parthenium argentatum
gaggaggaggag

SEQ ID NO: 4152 - DNA, 12 bp, Parthenium argentatum
gtggtggtggtg

SEQ ID NO: 4153 - DNA, 12 bp, Parthenium argentatum
gctgctgctgct

SEQ ID NO: 4154 - DNA, 12 bp, Parthenium argentatum
ggtggtggtggt

SEQ ID NO: 4155 - DNA, 24 bp, Parthenium argentatum
cactcccactcccactcccactcc

SEQ ID NO: 4156 - DNA, 12 bp, Parthenium argentatum
tgatgatgatga

SEQ ID NO: 4157 - DNA, 15 bp, Parthenium argentatum
atcatcatcatcatc

SEQ ID NO: 4158 - DNA, 12 bp, Parthenium argentatum
aataataataat

SEQ ID NO: 4159 - DNA, 12 bp, Parthenium argentatum
tatatatatata

SEQ ID NO: 4160 - DNA, 12 bp, Parthenium argentatum
acaacaacaaca

SEQ ID NO: 4161 - DNA, 27 bp, Parthenium argentatum
accaccaccaccaacaacaacaacaac

SEQ ID NO: 4162 - DNA, 15 bp, Parthenium argentatum
catcatcatcatcat

SEQ ID NO: 4163 - DNA, 12 bp, Parthenium argentatum
agcagcagcagc

SEQ ID NO: 4164 - DNA, 12 bp, Parthenium argentatum
gaagaagaagaa

SEQ ID NO: 4165 - DNA, 24 bp, Parthenium argentatum
ataataataatagtggtggtggtg

SEQ ID NO: 4166 - DNA, 12 bp, Parthenium argentatum
agcagcagcagc

SEQ ID NO: 4167 - DNA, 18 bp, Parthenium argentatum
ccaccaccaccaccacca

SEQ ID NO: 4168 - DNA, 16 bp, Parthenium argentatum
atcaatcaatcaatca

SEQ ID NO: 4169 - DNA, 15 bp, Parthenium argentatum
cctcctcctcctcct

SEQ ID NO: 4170 - DNA, 15 bp, Parthenium argentatum
ttcttcttcttcttc

SEQ ID NO: 4171 - DNA, 12 bp, Parthenium argentatum
aagaagaagaag

SEQ ID NO: 4172 - DNA, 12 bp, Parthenium argentatum
ccaccaccacca

SEQ ID NO: 4173 - DNA, 18 bp, Parthenium argentatum
taataataataataataa

SEQ ID NO: 4174 - DNA, 12 bp, Parthenium argentatum
tgatgatgatga

SEQ ID NO: 4175 - DNA, 12 bp, Parthenium argentatum
ccaccaccacca

SEQ ID NO: 4176 - DNA, 12 bp, Parthenium argentatum
agcagcagcagc

SEQ ID NO: 4177 - DNA, 12 bp, Parthenium argentatum
ggtggtggtggt

SEQ ID NO: 4178 - DNA, 14 bp, Parthenium argentatum
acacacacacacac

SEQ ID NO: 4179 - DNA, 12 bp, Parthenium argentatum
tgatgatgatga

SEQ ID NO: 4180 - DNA, 12 bp, Parthenium argentatum
ccaccaccacca

SEQ ID NO: 4181 - DNA, 12 bp, Parthenium argentatum
atatatatatat

SEQ ID NO: 4182 - DNA, 15 bp, Parthenium argentatum
acaacaacaacaaca

SEQ ID NO: 4183 - DNA, 15 bp, Parthenium argentatum
accaccaccaccacc

SEQ ID NO: 4184 - DNA, 27 bp, Parthenium argentatum
atcatcatcatcatcattattattatt

SEQ ID NO: 4185 - DNA, 18 bp, Parthenium argentatum
ggtggtggtggtggtggt

SEQ ID NO: 4186 - DNA, 12 bp, Parthenium argentatum
aagaagaagaag

SEQ ID NO: 4187 - DNA, 15 bp, Parthenium argentatum
aataataataataat

SEQ ID NO: 4188 - DNA, 12 bp, Parthenium argentatum
ccgccgccgccg

SEQ ID NO: 4189 - DNA, 12 bp, Parthenium argentatum
ggtggtggtggt

SEQ ID NO: 4190 - DNA, 12 bp, Parthenium argentatum
gctgctgctgct

SEQ ID NO: 4191 - DNA, 12 bp, Parthenium argentatum
ccaccaccacca

SEQ ID NO: 4192 - DNA, 15 bp, Parthenium argentatum
cagcagcagcagcag

SEQ ID NO: 4193 - DNA, 12 bp, Parthenium argentatum
ccaccaccacca

SEQ ID NO: 4194 - DNA, 14 bp, Parthenium argentatum
tctctctctctctc

SEQ ID NO: 4195 - DNA, 18 bp, Parthenium argentatum
atcatcatcatcatcatc

SEQ ID NO: 4196 - DNA, 12 bp, Parthenium argentatum
gaagaagaagaa

SEQ ID NO: 4197 - DNA, 12 bp, Parthenium argentatum
gaagaagaagaa

SEQ ID NO: 4198 - DNA, 12 bp, Parthenium argentatum
tcctcctcctcc

SEQ ID NO: 4199 - DNA, 12 bp, Parthenium argentatum
tcgtcgtcgtcg

SEQ ID NO: 4200 - DNA, 12 bp, Parthenium argentatum
ataataataata

SEQ ID NO: 4201 - DNA, 12 bp, Parthenium argentatum
ccaccaccacca

SEQ ID NO: 4202 - DNA, 12 bp, Parthenium argentatum
aacaacaacaac

SEQ ID NO: 4203 - DNA, 12 bp, Parthenium argentatum
tattattattat

SEQ ID NO: 4204 - DNA, 24 bp, Parthenium argentatum
aggtcaaggtcaaggtcaaggtca

SEQ ID NO: 4205 - DNA, 15 bp, Parthenium argentatum
atgatgatgatgatg

SEQ ID NO: 4206 - DNA, 15 bp, Parthenium argentatum
aacaacaacaacaac

SEQ ID NO: 4207 - DNA, 15 bp, Parthenium argentatum
atgatgatgatgatg

SEQ ID NO: 4208 - DNA, 12 bp, Parthenium argentatum
tcctcctcctcc

SEQ ID NO: 4209 - DNA, 12 bp, Parthenium argentatum
aacaacaacaac

SEQ ID NO: 4210 - DNA, 18 bp, Parthenium argentatum
tggtggtggtggtggtgg

SEQ ID NO: 4211 - DNA, 12 bp, Parthenium argentatum
acaacaacaaca

SEQ ID NO: 4212 - DNA, 12 bp, Parthenium argentatum
gatgatgatgat

SEQ ID NO: 4213 - DNA, 12 bp, Parthenium argentatum
accaccaccacc

SEQ ID NO: 4214 - DNA, 12 bp, Parthenium argentatum
accaccaccacc

SEQ ID NO: 4215 - DNA, 12 bp, Parthenium argentatum
aataataataat

SEQ ID NO: 4216 - DNA, 12 bp, Parthenium argentatum
gagagagagaga

SEQ ID NO: 4217 - DNA, 18 bp, Parthenium argentatum
taataataataataataa

SEQ ID NO: 4218 - DNA, 24 bp, Parthenium argentatum
gaagaagaagaaacgacgacgacg

SEQ ID NO: 4219 - DNA, 12 bp, Parthenium argentatum
accaccaccacc

SEQ ID NO: 4220 - DNA, 24 bp, Parthenium argentatum
atcaagatcaagatcaagatcaag

SEQ ID NO: 4221 - DNA, 12 bp, Parthenium argentatum
cagcagcagcag

SEQ ID NO: 4222 - DNA, 12 bp, Parthenium argentatum
tcttcttcttct

SEQ ID NO: 4223 - DNA, 12 bp, Parthenium argentatum
tgtgtgtgtgtg

SEQ ID NO: 4224 - DNA, 12 bp, Parthenium argentatum
ataataataata

SEQ ID NO: 4225 - DNA, 18 bp, Parthenium argentatum
caccaccaccaccaccac

SEQ ID NO: 4226 - DNA, 24 bp, Parthenium argentatum
ccaccaccaccatggtggtggtgg

SEQ ID NO: 4227 - DNA, 42 bp, Parthenium argentatum
aataataataataataagaagaagaagaagccgccgccgccg

SEQ ID NO: 4228 - DNA, 12 bp, Parthenium argentatum
gtgtgtgtgtgt

SEQ ID NO: 4229 - DNA, 39 bp, Parthenium argentatum
ccaactccaactccaactccaactcatcatcatcatcat

SEQ ID NO: 4230 - DNA, 24 bp, Parthenium argentatum
aggtggaggtggaggtggaggtgg

SEQ ID NO: 4231 - DNA, 18 bp, Parthenium argentatum
atatatatatatatatat

SEQ ID NO: 4232 - DNA, 12 bp, Parthenium argentatum
attattattatt

SEQ ID NO: 4233 - DNA, 12 bp, Parthenium argentatum
cgacgacgacga

SEQ ID NO: 4234 - DNA, 28 bp, Parthenium argentatum
caatcaatcaatcaatggcggcggcggc

SEQ ID NO: 4235 - DNA, 15 bp, Parthenium argentatum
catcatcatcatcat

SEQ ID NO: 4236 - DNA, 24 bp, Parthenium argentatum
ccgcacccgcacccgcacccgcac

SEQ ID NO: 4237 - DNA, 12 bp, Parthenium argentatum
agaagaagaaga

SEQ ID NO: 4238 - DNA, 12 bp, Parthenium argentatum
aagaagaagaag

SEQ ID NO: 4239 - DNA, 12 bp, Parthenium argentatum
caacaacaacaa

SEQ ID NO: 4240 - DNA, 12 bp, Parthenium argentatum
acaacaacaaca

SEQ ID NO: 4241 - DNA, 14 bp, Parthenium argentatum
tgtgtgtgtgtgtg

SEQ ID NO: 4242 - DNA, 12 bp, Parthenium argentatum
caccaccaccac

SEQ ID NO: 4243 - DNA, 12 bp, Parthenium argentatum
ccaccaccacca

SEQ ID NO: 4244 - DNA, 14 bp, Parthenium argentatum
tctctctctctctc

SEQ ID NO: 4245 - DNA, 15 bp, Parthenium argentatum
gatgatgatgatgat

SEQ ID NO: 4246 - DNA, 15 bp, Parthenium argentatum
tggtggtggtggtgg

SEQ ID NO: 4247 - DNA, 12 bp, Parthenium argentatum
accaccaccacc

SEQ ID NO: 4248 - DNA, 45 bp, Parthenium argentatum
tcaacctcaacctcaacctcaacctcaaccaacaacaacaacaac

SEQ ID NO: 4249 - DNA, 15 bp, Parthenium argentatum
ataataataataata

SEQ ID NO: 4250 - DNA, 12 bp, Parthenium argentatum
atcatcatcatc

SEQ ID NO: 4251 - DNA, 16 bp, Parthenium argentatum
ttatttatttatttat

SEQ ID NO: 4252 - DNA, 12 bp, Parthenium argentatum
gcagcagcagca

SEQ ID NO: 4253 - DNA, 12 bp, Parthenium argentatum
gaagaagaagaa

SEQ ID NO: 4254 - DNA, 12 bp, Parthenium argentatum
cctcctcctcct

SEQ ID NO: 4255 - DNA, 12 bp, Parthenium argentatum
atatatatatat

SEQ ID NO: 4256 - DNA, 12 bp, Parthenium argentatum
ataataataata

SEQ ID NO: 4257 - DNA, 12 bp, Parthenium argentatum
aagaagaagaag

SEQ ID NO: 4258 - DNA, 15 bp, Parthenium argentatum
ataataataataata

SEQ ID NO: 4259 - DNA, 12 bp, Parthenium argentatum
accaccaccacc

SEQ ID NO: 4260 - DNA, 12 bp, Parthenium argentatum
ccgccgccgccg

SEQ ID NO: 4261 - DNA, 18 bp, Parthenium argentatum
ttattattattattatta

SEQ ID NO: 4262 - DNA, 12 bp, Parthenium argentatum
gaagaagaagaa

SEQ ID NO: 4263 - DNA, 12 bp, Parthenium argentatum
tatatatatata

SEQ ID NO: 4264 - DNA, 15 bp, Parthenium argentatum
attattattattatt

SEQ ID NO: 4265 - DNA, 12 bp, Parthenium argentatum
agcagcagcagc

SEQ ID NO: 4266 - DNA, 12 bp, Parthenium argentatum
cagcagcagcag

SEQ ID NO: 4267 - DNA, 12 bp, Parthenium argentatum
cacacacacaca

SEQ ID NO: 4268 - DNA, 15 bp, Parthenium argentatum
accaccaccaccacc

SEQ ID NO: 4269 - DNA, 12 bp, Parthenium argentatum
aacaacaacaac

SEQ ID NO: 4270 - DNA, 18 bp, Parthenium argentatum
gatgatgatgatgatgat

SEQ ID NO: 4271 - DNA, 12 bp, Parthenium argentatum
gaagaagaagaa

SEQ ID NO: 4272 - DNA, 12 bp, Parthenium argentatum
gaggaggaggag

SEQ ID NO: 4273 - DNA, 12 bp, Parthenium argentatum
gtcgtcgtcgtc

SEQ ID NO: 4274 - DNA, 12 bp, Parthenium argentatum
ggaggaggagga

SEQ ID NO: 4275 - DNA, 12 bp, Parthenium argentatum
ggtggtggtggt

SEQ ID NO: 4276 - DNA, 18 bp, Parthenium argentatum
actactactactactact

SEQ ID NO: 4277 - DNA, 18 bp, Parthenium argentatum
tgtgtgtgtgtgtgtgtg

What is claimed is:

1-29. (canceled)

30. A method for breeding a guayule plant comprising:
(a) evaluating one or more guayule plants using objective criteria to obtain phenotype scores;
(b) determining the genetic pedigree of one or more guayule plants using DNA analysis; and
(c) using the phenotype scores and genetic pedigrees to identify one or more select guayule plants for use in guayule plant breeding to produce an advanced guayule plant.

31. The method of claim 30, wherein the DNA analysis is performed using DNA of single nucleotide polymorphisms (SNPs) or mono-, di-, tri-, tetra-, penta- or hexanucleotide simple sequence repeats (SSRs).

32. The method of claim 31, wherein the SNPs comprise one or more SNPs listed in Table 9.

33. The method of claim 31, wherein the SSRs comprise one or more SSRs listed in Tables 11 and 12.

34. The method of claim 30, wherein two select guayule plants are identified that are genetically highly dissimilar and the two select plants are crossed to produce an advanced guayule plant.

35. A guayule plant produced by the method of claim 30.

36. A rubber composition extracted from the plant of claim 35.

37. A product comprising the rubber composition of claim 36.

38. A method for identifying a genetic marker linked to a trait locus of a guayule plant, said method comprising the steps of:
(a) extracting nucleic acid from a guayule plant;
(b) amplifying the nucleic acid using a set of primers comprising two or more primers listed in Tables 11 and 12;
(c) determining the genotype of the plant using a set of molecular markers comprising one or more SSRs listed in Tables 11 and 12;
(d) associating a genetic marker with an expressed trait of the guayule plant.

39. The method of claim 38, wherein the genetic marker is linked to an expressed trait for rubber content, rubber quality, rubber yield, average molecular weight of rubber, plant size, plant vigor, plant uniformity, salinity tolerance, temperature tolerance, disease resistance, or drought tolerance.

40. The method of claim 39, wherein the genetic marker is linked to rubber quality.

41. The method of claim 39, wherein the genetic marker is linked to rubber yield.

42. The method of claim 10, wherein the genetic marker is linked to plant size.

43. A method for breeding a guayule plant comprises:
determining the rate of apomixis of one or more guayule plants, using the resulting information regarding the rate of apomixis of the plant(s) to identify one more select guayule plant(s) for use in guayule plant breeding to produce an advanced guayule plant.

44. Guayule plants, seeds, or plant tissue generated from the method of claim 43.

45. The method of claim 43, wherein the method further comprises:
determining the genetic pedigree of the one or more guayule plants; and
using the information regarding rate of apomixis and genetic pedigree to identify one or more select guayule plants for use in guayule plant breeding to produce an advanced guayule plant.

46. The method of claim 45, wherein the genetic pedigree is determined by DNA analysis performed using DNA of single nucleotide polymorphisms (SNPs) or mono-, di-, tri-, tetra-, penta- or hexanucleotide simple sequence repeats (SSRs).

47. The method of claim 46, wherein the SNPs comprise one or more SNPs listed in Table 9.

48. The method of claim 46, wherein the SSRs comprise one or more SSRs listed in Tables 11 and 12.

49. Guayule plants, seeds, or plant tissue generated from the method of claim 45.
